(19) United States
(12) Patent Application Publication
(10) Pub. No.: US 2023/0147495 A1
(43) Pub. Date: May 11, 2023

(54) GENOME ENGINEERING USING CRISPR RNA-GUIDED INTEGRASES

(71) Applicants: Phuc Hong VO, New York, NY (US); THE TRUSTEES OF COLUMBIA UNIVERSITY IN THE CITY OF NEW YORK, New York, NY (US)

(72) Inventors: Phuc Hong Vo, New York, NY (US); Samuel Sternberg, New York, NY (US)

(21) Appl. No.: 17/907,510

(22) PCT Filed: Mar. 26, 2021
(86) PCT No.: PCT/US21/24422

§ 371 Date: Sep. 27, 2022

Related U.S. Application Data
(60) Provisional application No. 63/001,008, filed on Mar. 27, 2020.
(60) Provisional application No. 63/053,460, filed on Jul. 17, 2020.
(60) Provisional application No. 63/081,677, filed on Sep. 22, 2020.

(51) Int. Cl. C12N 15/90; C12N 15/10; C12N 15/113; C12N 9/22

(52) U.S. Cl. CPC C12N 15/902; C12N 15/102; C12N 15/113; C12N 9/22; C12N 2310/20

(57) ABSTRACT

The present disclosure provides systems and methods for targeted nucleic acid deletions and inactivation of a gene of interest comprising a Clustered Regularly Interspaced Short Palindromic Repeats (CRISPR)-CRISPR associated (Cas) (CRISPR-Cas) system comprising at least one Cas protein and a pair of guide RNAs (gRNAs), an engineered transposon system, at least one donor nucleic acid, and a recombinase. The present disclosure also provides methods for genetically modifying diverse bacterial communities comprising contacting a recipient bacterial community with donor bacteria, the donor bacteria comprising a vector encoding: an engineered CRISPR-Cas system, wherein the engineered CRISPR-Cas system comprises: at least one Cas protein and at least one guide RNA (gRNA); an engineered transposon system; at least one donor nucleic acid to be integrated comprising at least one transposon end sequence, and, optionally a recombinase, wherein the donor nucleic acid further comprises a recognitions site for the recombinase.

### CROSS-REFERENCE TO RELATED APPLICATIONS

[0001] This application claims the benefit of U.S. Provisional Application No. 63/001,008, filed Mar. 27, 2020, U.S. Provisional Application No. 63/053,460, filed Jul. 17, 2020, U.S. Provisional Application No. 63/081,677, filed Sep. 22, 2020, the content of each of the aforementioned applications is herein incorporated by reference in their entirety.

### FIELD

[0002] The present disclosure provides systems, kits, compositions, and methods for nucleic acid modification (e.g., deletion).

### BACKGROUND

[0003] The genetic engineering toolbox for genome manipulation comprises a diverse array of techniques, with DNA insertion technologies having arguably had the largest impact on biotechnology research. Gene knock-ins are used in the clinic to treat genetic diseases and cancer, in agriculture to improve crops, and in industry to manufacture biologics, among many other uses. These applications generally depend on either site-specific integration mediated by homologous recombination and gene editing, or random integration mediated by viral integrases or transposases. The former category is inherently precise but reliant on often-inefficient cellular factors or exogenous factors with limited host range, whereas the latter category exhibits high efficiency but little specificity. For certain genome engineering challenges, the ideal technology would exhibit high-efficiency DNA integration that bypasses the requirement for DNA double-strand breaks (DSBs) and homologous recombination, but with the specificity and programmability afforded by CRISPR-Cas gene-editing platforms.

### SUMMARY

[0004] 00041 Provided herein are systems, kits, and methods that facilitate targeted nucleic acid deletions. The system comprise an engineered Clustered Regularly Interspaced Short Palindromic Repeats (CRISPR)-CRISPR associated (Cas) (CRISPR-Cas) system, and/or one or more vectors encoding the engineered CRISPR-Cas system, wherein the engineered CRISPR-Cas system comprises: (a) at least one Cas protein, and (b) a pair of guide RNAs (gRNAs), wherein the pair of gRNAs is configured to hybridize to target sites flanking a nucleic acid sequence for deletion; an engineered transposon system, and/or one or more vectors encoding the engineered transposon system; a recombinase, or catalytic domain thereof, and/or one or more vectors encoding a recombinase, or catalytic domain thereof; and at least one donor nucleic acid to be integrated, wherein the donor nucleic acid comprises a recognition site for the recombinase flanked by at least one transposon end sequence. In some embodiments, the donor nucleic acid further comprises a cargo nucleic acid. In some embodiments, the system further comprises a target nucleic acid comprising the nucleic acid sequence for deletion.

[0005] In some embodiments, the engineered CRISPR-Cas system and the engineered transposon system are on the same or different vector(s). In some embodiments, the recombinase, or catalytic domain thereof, is on the same or different vector(s) from the engineered CRISPR-Cas system and/or the engineered transposon system.

[0006] In some embodiments, the recombinase, or catalytic domain thereof, comprises a tyrosine recombinase. In some embodiments, the recombinase comprises Cre recombinase, a mutant, variant, or catalytic domain thereof and the recognition site comprises a lox site or variant thereof. In some embodiments, the recombinase comprises flippase (FLP) recombinase, a mutant, variant, or catalytic domain thereof and the recognition site comprises a flippase recognition target (FRT) site or variant thereof. In some embodiments, the recombinase, or catalytic domain thereof, comprises a serine recombinase. In some embodiments, the recombinase comprises TniR resolvase, a mutant, variant, or catalytic domain thereof and the recognition site comprises a resolution (res) sequence or variant thereof. In some embodiments, the recombinase comprises a Tn3-like resolvase, mutant, variant, or catalytic domain thereof and the recognition site comprises a resolution (res) sequence or variant thereof. In some embodiments, the cargo nucleic acid comprises the recognition site for the recombinase.

[0007] In some embodiments, the engineered CRISPR-Cas system comprises a Type V system or a Type I system. In some embodiments, the engineered CRISPR-Cas system comprises Cas12k. In some embodiments, the engineered CRISPR-Cas system comprises Cas5, Cas6, Cas7, Cas8, or a combination thereof. In some embodiments, the engineered CRISPR-Cas system comprises a Cas8-Cas5 fusion protein.

[0008] In some embodiments, the engineered transposon system is derived from a Tn7 transposon system. In some embodiments, the engineered transposon system comprises TnsA, TnsB, TnsC, or a combination thereof. In some embodiments, the engineered transposon system comprises TniQ.

[0009] Also provided herein is a cell comprising the present system. In some embodiments, the cell is a eukaryotic cell. In some embodiments, the nucleic acid sequence for deletion is an endogenous nucleic acid. In some embodiments, the nucleic acid sequence for deletion is genomic DNA. In some embodiments, the system is a cell-free system.

[0010] In some embodiments, the methods for deleting a nucleic acid sequence from a target nucleic acid comprise contacting the target nucleic acid with the present system. In some embodiments, the target nucleic acid is in a cell and contacting the target nucleic acid comprises introducing into the cell. In some embodiments, the recombinase, or catalytic domain thereof, and/or one or more vectors encoding a recombinase, or catalytic domain thereof is introduced to the cell after the introduction of the engineered CRISPR-Cas system, the engineered transposon system, and the at least one donor nucleic acid. In some embodiments, the recombinase, or catalytic domain thereof, and/or one or more vectors encoding a recombinase, or catalytic domain thereof is introduced to the cell after the introduction of the engineered CRISPR-Cas system, the engineered transposon system, and the at least one donor nucleic acid. In some embodiments, introducing into the cell comprises administering to a subject. In some embodiments, the administering comprises intravenous administration.

[0011] Also provide are methods for inactivating a gene of interest. The methods comprise introducing into one or more cells the present system, wherein the nucleic acid sequence for deletion comprises at least a portion of the gene of interest. In some embodiments, the one or more cells comprises microbial cells. In some embodiments, the one or more cells comprises plant cells. In some embodiments, the one or more cells comprises animal cells. In some embodiments, the gene of interest comprises an antibiotic resistance gene, a virulence gene, or a metabolic gene.

[0012] Further provided herein are methods for genetically modifying diverse bacterial communities. The methods comprise contacting a recipient bacterial community with donor bacteria, the donor bacteria comprising a vector encoding: an engineered Clustered Regularly Interspaced Short Palindromic Repeats (CRISPR)-CRISPR associated (Cas) (CRISPR-Cas) system, wherein the engineered CRISPR-Cas system comprises: (a) at least one Cas protein, and (b) at least one guide RNA (gRNA); an engineered transposon system; and at least one donor nucleic acid to be integrated comprising at least one transposon end sequence. In some embodiments, the donor nucleic acid further comprises a cargo nucleic acid. In some embodiments, the vector is a conjugative plasmid.

[0013] In some embodiments, the engineered CRISPR-Cas system comprises a Type V system or a Type I system. In some embodiments, the engineered CRISPR-Cas system comprises Cas12k. In some embodiments, the engineered CRISPR-Cas system comprises Cas5, Cas6, Cas7, Cas8, or a combination thereof. In some embodiments, the engineered CRISPR-Cas system comprises a Cas8-Cas5 fusion protein.

[0014] In some embodiments, the engineered transposon system is derived from a Tn7 transposon system. In some embodiments, the engineered transposon system comprises TnsA, TnsB, TnsC, or a combination thereof. In some embodiments, the engineered transposon system comprises TniQ.

[0015] In some embodiments, the vector further encodes a recombinase, or a catalytic domain thereof, and the at least one donor nucleic acid further comprises a recognition site for the recombinase. In some embodiments, the cargo nucleic acid comprises the recognition site for the recombinase.

[0016] In some embodiments, the recombinase, or catalytic domain thereof, comprises a tyrosine recombinase. In some embodiments, the recombinase comprises Cre recombinase, a mutant, variant, or catalytic domain thereof and the recognition site comprises a lox site or variant thereof. In some embodiments, the recombinase comprises flippase (FLP) recombinase, a mutant, variant, or catalytic domain thereof and the recognition site comprises a flippase recognition target (FRT) site or variant thereof. In some embodiments, the recombinase, or catalytic domain thereof, comprises a serine recombinase. In some embodiments, the recombinase comprises TniR resolvase, a mutant, variant, or catalytic domain thereof and the recognition site comprises a resolution (res) sequence or variant thereof. In some embodiments, the recombinase comprises a Tn3-like resolvase, mutant, variant, or catalytic domain thereof and the recognition site comprises a resolution (res) sequence or variant thereof. In some embodiments, the cargo nucleic acid comprises the recognition site for the recombinase. In some embodiments, the engineered CRISPR-Cas system comprises a pair of guide RNAs (gRNAs), wherein the pair of gRNAs is configured to hybridize to target sites flanking a nucleic acid sequence for deletion.

[0017] In some embodiments, the engineered CRISPR-Cas system, the engineered transposon system, the recombinase, or a combination thereof are encoded within the at least one donor nucleic acid. In some embodiments, the engineered CRISPR-Cas system, the engineered transposon system, the recombinase, or a combination thereof are encoded within the cargo nucleic acid.

[0018] In some embodiments, the nucleic acid sequence for deletion comprises a genomic nucleic acid sequence endogenous to the recipient bacterial community. In some embodiments, the recipient bacterial community is isolated from fecal matter. In some embodiments, the recipient bacterial community comprises gut bacteria.

### BRIEF DESCRIPTION OF THE DRAWINGS

[0019] FIGS. 1A-1F show streamlined single-plasmid system for RNA-guided DNA integration. FIG. 1A is a schematic of INTEGRATE (insertion of transposable elements by guide RNA-assisted targeting) using a Vibrio cholerae CRISPR-transposon. RNA-guided DNA integration occurs ˜47-51 bp downstream of the target site, in one of two possible orientations (T-RL and T-LR); the donor DNA comprises a genetic cargo flanked by left (L) and right (R) transposon ends (FIG. 1B). FIG. 1C, top, shows a three-plasmid INTEGRATE system which encodes protein-RNA components on pQCascade and pTnsABC, and the donor DNA on pDonor. On the bottom, a single-plasmid INTEGRATE system (pSPIN) drives protein-RNA expression with a single promoter, on the same vector as the donor DNA. FIG. 1D is a graph of qPCR-based quantification of integration efficiency with crRNA-4, for pSPIN containing distinct vector backbones of differing copy numbers. FIG. 1E is a graph of relative integration efficiencies for the three-plasmid or single-plasmid (pSPIN) expression system across five distinct crRNAs. Data are normalized to the three-plasmid system; pSPIN contained the pBBR1 backbone. FIG. 1F is normalized Tn-seq data for crRNA-13 and a non-targeting crRNA (crRNA-NT) for pSPIN containing the pBBR1 backbone. Genome-mapping reads are normalized to the reads from a spike-in control; the target site is denoted by a maroon triangle. Data in FIGS. 1D and 1E are shown as mean±s.d. for n=3 biologically independent samples.

[0020] FIGS. 2A-2E show INTEGRATE supports high-efficiency insertion of large (10-kb) genetic payloads. FIG. 2A is a graph of qPCR-based quantification of integration efficiency with crRNA-4 as a function of pSPIN promoter identity. FIG. 2B is a graph of DNA integration specificity (black) for the promoters shown, as determined by Tn-seq, calculated as the percent of on-target reads relative to all genome-mapping reads; total integration efficiencies (qPCR) are plotted in grey. FIG. 2C is a graph of qPCR-based quantification of integration efficiency for crRNA-4 as a function of culture temperature and promoter strength. Integration reaches ˜100% efficiency at lower growth temperatures for all constructs, including the weaker J23114 promoter. FIG. 2D is graphs of qPCR-based quantification of integration efficiency for variable mini-Tn sizes after culturing at either 30 or 37° C. The promoter and crRNA used in each panel are shown at top; experiments were performed with a two-plasmid system comprising pEffector (pEffector-B, FIG. 6C) and pDonor. Unless specified, transposition assays elsewhere in this study use a 0.98-kb mini-Tn. FIG. 2E shows qPCR-based quantification of integration efficiency with crRNA-4 for a single-plasmid autonomous INTEGRATE system (pSPAIN), after culturing at 30 and 37° C. The inserted DNA encodes all the necessary machinery for further mobilization. Integration efficiency data in FIGS. 32A-3E are shown as mean±s.d. for n=3 biologically independent samples.

[0021] FIGS. 3A-3D show orthogonal INTEGRATE systems facilitate multiple, iterative insertions. FIG. 3A shows the effect of target immunity on RNA-guided DNA integration. An E. coli strain containing a single genomically integrated mini-Tn was generated, and the efficiency of additional transposition events using crRNAs targeting d bp upstream was determined by qPCR. Plotted is the relative efficiency for each crRNA in the immunized versus wild-type strain. FIG. 3B, top, is a schematic showing re-mobilization of a genomically integrated mini-Tn (target-4) to a new genomic site (target-1) with crRNA-1. FIG. 3B, bottom, shows PCR products probing for the mini-Tn at target-4 (left) and target−1 (right), resolved by agarose gel electrophoresis. The mini-Tn is efficiently transposed to target-1 by crRNA-1, without apparent loss of the mini-Tn at target-4. FIG. 3C, top, is a schematic of orthogonal INTEGRATE systems from V. cholerae (Vch: Type I-F) and S. hofmannii (Sho; Type V-K), in which pDonor is separate from pEffector. FIG. 3C, bottom, shows PCR products probing for RNA-guided DNA integration at target-4 with both systems, resolved by gel electrophoresis. Integration only proceeds with a cognate pairing between the expression and donor plasmids. FIG. 3D, top, is a schematic of a second DNA insertion made by leveraging the orthogonal ShoINT system, for which the Vch mini-Tn is inert. FIG. 3D, bottom, shows PCR products probing for either the Vch mini-Tn (top) or Sho mini-Tn (bottom) at target-4 (left) and target−1 (right), resolved by agarose gel electrophoresis. The Sho mini-Tn is efficiently integrated at target-1 by sgRNA-1, without loss of the Vch mini-Tn at target-4. Data in a are shown as mean±s.d. for n=3 biologically independent samples.

[0022] FIGS. 4A-4I show multi-spacer CRISPR arrays direct multiplex insertions in a single step. FIG. 4A is a schematic of multiplexed RNA-guided DNA integration events with pSPIN encoding a multi-spacer CRISPR array. FIG. 4B is a graph of qPCR-based quantification of integration efficiency with crRNA-NT (grey) and crRNA-4 (maroon), encoded in a single-, double-, or triple-spacer CRISPR array in the position indicated: white squares represent other functional crRNAs. Data are normalized to the single-spacer array efficiency. FIG. 4C shows Tn-seq data for a triple-spacer CRISPR array, plotted as the percent of total genome-mapping reads. The target sites are denoted by colored triangles, and the insets show the distribution of integration events within a 42-58 bp window downstream of the target site. FIG. 4D is a schematic of experiment using thrC- and lysA-specific spacers for single-step generation of threonine-lysine auxotrophic E. coli. FIG. 4E is a graph of the recovery percentage of the indicated clonal genotypes (WT, single-knockout, or double-knockout) after transforming E. coli with pSPIN encoding a double-spacer CRISPR array containing both hrC- and lynA-specific spacers. Colonies were stamped onto M9-agar supplemented with either H₂O, threonine, lysine, or threonine and lysine, and genotypes were determined based on survivability in each of these conditions. FIG. 4F is growth curves for WT and double-knockout E. coli clones cultured at 37° C. in LB or M9 minimal media with or without supplemented threonine (T) and lysine (L). FIG. 5G is a schematic of experimental approach to generate programmed genomic deletions. A double-spacer array directs multiplex insertion of two mini-Tn copies carrying LoxP sites: subsequent introduction of Crc recombinase leads to precise excision of the genomic fragment spanning the LoxP sites. FIG. 4H, left, is a schematic showing genomic locus targeted for deletion. FIG. 4H, right, shows the indicated double-spacer arrays were used to generate defined deletions, and PCR was performed with the indicated primer pairs to detect the presence/absence of genomic fragments flanking each target site, resolved by agarose gel electrophoresis. FIG. 4I shows that the programmed genomic deletions generated in FIG. 4H (2.4-, 10-, or 20-kb in length) were further verified by whole-genome, single-molecule real-time (SMRT) sequencing. The mini-transposon is indicated with an arrow. Data in FIG. 4B and FIG. 4E are shown as mean±s.d. for n=3 biologically independent samples. Data in f are shown as mean±s.d. for three technical replicates.

[0023] FIGS. 5A-5E show robust and highly-accurate INTEGRATE activity in additional Gram-negative bacteria. FIG. 5A is a schematic showing the use of pSPIN constructs with constitutive J23119 promoter and broad-host pBBR1 backbone for RNA-guided DNA insertions in Klebsiella oxytoca and Pseudomonas putida with corresponding micrographs. FIG. 5B shows PCR products probing for mini-Tn insertion at two different genomic loci in K. oxytoca (left) and P. putida (right), resolved by agarose gel electrophoresis. FIG. 5C is normalized Tn-seq data for select targeting and non-targeting crRNAs for K. oxytoca (top) and P. putida (bottom). Genome-mapping reads are normalized to the reads from a spike-in control: the target site is denoted by a maroon triangle. FIG. 5D, top, is a schematic showing self-targeting of the spacer within the CRISPR array inactivates the pSPIN-encoded INTEGRATE system, and was detected for select crRNAs by Tn-seq (FIG. 5D, middle). FIG. 5D, bottom, is a graph showing P. putida crRNAs targeting nicC and bdhA, but not nirD, show substantial plasmid self-targeting relative to genomic integration, as assessed by Tn-seq. FIG. 5D, top, is a schematic showing a modified vector (pSPIN-R) places the CRISPR array proximal to the mini-Tn, whereby self-targeting is blocked by target immunity. FIG. 5D, bottom, is a graph showing P. putida crRNAs targeting nicC and bcAA no longer show any evidence of self-targeting with pSPIN-R, as assessed by Tn-seq.

[0024] FIGS. 6A-6C show the reduction of promoter and plasmid requirements for RNA-guided DNA integration. FIG. 6A is a schematic illustrating Cas6-dependent processing of an RNA transcript comprising precursor CRISPR RNA and polycistronic mRNA, which liberates the mature crRNA; CRISPR repeats are shown as hairpins. FIG. 6B shows three pQCascade designs containing either two or one T7 promoters, with the CRISPR array either upstream of downstream of the operon, top, and qPCR-based quantification of integration efficiency with crRNA-4 (bottom). Cells contained pDonor, pTnsABC, and the indicated pQCascade construct. FIG. 6C shows four protein-RNA expression plasmid constructs containing either two or one T7 promoters, with the CRISPR array either upstream of downstream of the operon (top) and qPCR-based quantification of integration efficiency with crRNA-4 (bottom). Cells contained pDonor and the indicated expression plasmid. Data in FIGS. 6B and 6C are shown as mean±s.d. for n=3 biologically independent samples.

[0025] FIGS. 7A-7C show Mini-Tn vector context effects on integration orientation. FIG. 7A is graphs of integration efficiencies in the T-RL and T-LR orientation are plotted from experiments in FIG. 1E, for the three-plasmid and single-plasmid expression systems. Integration is more heavily biased towards T-RL for the single-plasmid system, particularly for crRNA-4. FIG. 7B is a schematic of the original pDonor plasmid, which contains a lac promoter upstream of the transposon right end, and a modified pDonor plasmid in which this promoter was removed. The modified pDonor shows more frequent T-RL integration, which may be due to the absence of active transcription across the right (R) transposon end. FIG. 7C is a comparison of integration orientation bias (T-RL:T-LR) for the three-plasmid expression system with crRNA-4, using the original or modified pDonor; efficiencies were measured by qPCR. Data in FIGS. 7A and 7C are shown as mean±s.d. for n=3 biologically independent samples.

[0026] FIGS. 8A-8E show Genome-wide analysis of RNA-guided DNA integration by Tn-seq. FIG. 8A is an exemplary Tn-seq workflow for deep sequencing of genome-wide transposition events. FIG. 8B shows genome-wide distribution of genome-mapping Tn-seq reads for crRNA-1 and crRNA-4 using either the single-plasmid or three-plasmid expression system; the target site is denoted by a maroon triangle. FIG. 8C is Tn-seq for additional crRNAs using the single-plasmid expression system, shown as in FIG. 8B. FIG. 8D is integration site distributions for crRNA-1 (top) and crRNA-4 (bottom) using either the single-plasmid or three-plasmid expression system, determined from the Tn-seq data; the distance between the target site and mini-Tn insertion site is shown. Data for both integration orientations are superimposed, with filled blue bars and dark outlines representing T-RL and T-LR, respectively. Values in the top-right corner of each graph give the on-target specificity (%), calculated as the percentage of reads resulting from integration within 100 bp of the primary integration site compared to all genome-mapping reads, and the orientation bias (X:Y), calculated as the ratio of T-RL:T-LR reads within the on-target window. FIG. 8E is integration site distributions for additional crRNAs using the single-plasmid expression system, shown as in FIG. 8D.

[0027] FIGS. 9A-9G show Analysis of genome-wide integration specificity as a function of promoter strength, cargo size, and E. coli strain. FIG. 9A is integration site distributions for crRNA-4 as a function of promoter strength, determined from the Tn-seq data; the distance between the target site and mini-Tn insertion site is shown. Data for both integration orientations are superimposed, with filled blue bars and dark outlines representing T-RL and T-LR, respectively. Values in the top-right corner of each graph give the on-target specificity (%), calculated as the percentage of reads resulting from integration within 100 bp of the primary integration site compared to all genome-mapping reads, and the orientation bias (X:Y), calculated as the ratio of T-RL:T-LR reads within the on-target window. FIG. 9B is integration site distributions for crRNA-13, determined for three different laboratory strains of E. coli, shown as FIG. 9A. FIG. 9C is qPCR-based quantification of integration efficiency for crRNA-13 in the indicated Keio knockout strains; integration efficiency was reduced for the ΔrecB and ΔrecC strains, but unaffected in ΔrecA, ΔrecD, ΔrecF, and ΔmutS strains. Data are normalized to the efficiency in the WT BW25113 parental strain. FIG. 9D is integration site distribution for crRNA-4 under control of the J23119 promoter after cells were cultured at 30° C., shown as in FIG. 9A. FIG. 9E is qPCR-based quantification of integration efficiency for variable mini-Tn sizes after culturing at either 30 or 37° C. The promoter and crRNA used are shown at top. FIG. 9F is integration site distributions for crRNA-4 as a function of cargo size, shown as in. FIG. 9G is whole-genome, single-molecule real-time (SMRT) sequencing data for an isolated clone containing the 10-kb insertion, shown as coverage of aligned reads across the entire locus. Data in FIGS. 9C and 9E are shown as mean±s.d. for n=3 biologically independent samples.

[0028] FIGS. 10A-10E show Evaluation of mini-Tn remobilization by Vch INTEGRATE, and characterization of anew Type V-K S. hofmannii INTEGRATE system. FIG. 10A shows a schematic (left) showing potential competition between a genomic- and pDonor-borne mini-Tn when a new site is targeted for RNA-guided DNA integration; the two possible products can be discriminated by cargo-specific primer binding sites. PCR products probing for transposition of the genomic mini-Tn (FIG. 10A, right, top) or pDonor-borne mini-Tn (FIG. 10A, right, bottom) to the target-1 locus. Although pDonor is the preferred substrate, there is also detectable re-mobilization of the genomic mini-Tn substrate, without apparent loss of the mini-Tn at target-4. FIG. 10B is a schematic of native genomic organization of a Type VK CRISPR-transposon encoding Cas12k, found within the genome of Scytonema hofmannii (Sho) strain PCC 7110 (top), and plasmid constructs used to recombinantly express the sgRNA and protein components (Sho-pGCT) and the mini-Tn (Sho-pDonor) (bottom). FIG. 10C shows the genomic locus targeted by sgRNAs 31-34 (top), and PCR analysis of transposition by ShoINT, resolved by agarose gel electrophoresis (bottom). Bidirectional integration was observed in both T-RL and T-LR orientations for multiple sgRNAs, though there is a strong bias for T-LR. FIG. 10D is an overview of RNA-guided DNA integration by ShoINT. Insertion occurs in two possible orientations, similarly to the Type I-F VchINT system, at an approximate distance of 25-35 bp from the edge of the target site. The 4-nt PAM and 23-nt protospacer are shown as orange and maroon rectangles, respectively. FIG. 10E is a graph of qPCR-based quantification of integration efficiency for sgRNAs. Data in FIG. 10E are shown as mean±s.d. for n=3 biologically independent samples.

[0029] FIGS. 11A-11C show Analysis of genome-wide integration events for three CRISPR-transposon systems. FIG. 11A is a comparison of two distinct next-generation sequencing (NGS) library preparation techniques for analyses of genome-wide integration specificity with VchINT: transposon-insertion sequencing (Tn-seq), based on restriction digestion and adaptor ligation onto mini-Tn-containing genomic fragments, followed by targeted PCR; and random fragmentation and adaptor ligation onto all genomic fragments, followed by targeted PCR. The target site is denoted by a maroon triangle. Insets show integration site distributions determined from the NGS data; the distance between the target site and mini-Tn insertion site is shown. Data for both integration orientations are superimposed, with filled blue bars and dark outlines representing T-RL and T-LR, respectively. Values in the top-right corner of each graph give the on-target specificity (%), calculated as the percentage of reads resulting from integration within 100 bp of the primary integration site compared to all genome-mapping reads, and the orientation bias (X:Y), calculated as the ratio of T-RL:T-LR reads within the on-target window. Both analyses return highly consistent data. FIG. 11B is the analysis of genome-wide integration specificity with ShoINT and the ShCAST system described previously, shown as in FIG. 11A. ShoINT exhibited high levels of integration into the T7 RNAP gene (†), suggesting a cellular fitness benefit when expression of the recombinant protein-RNA machinery is eliminated through T7 RNAP inactivation. FIG. 11C is a comparison of genome-wide specificity between VchINT (Type I-F), ShoINT (Type V-K), and ShCAST (Type V-K) as assessed via random fragmentation-based NGS library preparation, shown as in a but focused on reads comprising 1% or less of the library. The Type IF system exhibits exquisite accuracy, whereas both Type V-K systems exhibit rampant nonspecific integration across the E. coli genome. *, low-level, well-to-well contamination of NGS data from other samples.

[0030] FIGS. 12A and 12B show genome-wide analysis of multiplexed RNA-guided DNA integration. FIG. 12A is genome-wide distribution of genome-mapping Tn-seq reads for a double-spacer (top) and triple-spacer (bottom) CRISPR array; the corresponding target sites are denoted by similarly colored triangles. The top graphs plot the percentage of total reads; the bottom graphs focus on reads comprising 1% or less of the library, revealing an absence of detectable off-target events. The overall on-target percentages combine all reads mapping to the on-target window of each individual genomic target. FIG. 12B shows integration site distributions for the indicated crRNA as a function of CRISPR array composition, determined from the Tn-seq data: the distance between the target site and mini-Tn insertion site is shown. Data for both integration orientations are superimposed, with filled blue bars and dark outlines representing T-RL and T-LR, respectively.

[0031] FIG. 13A-13D show generation of auxotrophic E. coli strains through single- or multiplex integration. FIG. 13A is a workflow for generating and screening auxotrophic E. coli knockouts with multiplexed RNA-guided DNA integration. FIG. 13B is growth curves for single-knockout E. coli clones cultured at 37° C. in LB or M9 minimal media with or without supplemented threonine (T) and lysine (L). FIG. 13C is growth curves for WT or control E. coli clones transformed with a non-targeting crRNA (crRNA-NT), cultured at 37° C. in LB or M9 minimal media with or without supplemented threonine (T) and lysine (L). FIG. 13D is growth curves for double-knockout E. coli clone cultured at 37° C. in LB or M9 minimal media with or without supplemented threonine (T) and lysine (L), after five cycles of serial passaging and overnight growth in LB media. Data in FIGS. 13B-13D are shown as mean f s.d. for three technical replicates.

[0032] FIGS. 14A-14C show SMRT sequencing of programmed deletions using INTEGRATE and Cre-Lox. FIG. 14A shows a schematic (top) of genomic locus targeted for a 2.4-kb deletion with the double-spacer CRISPR array shown at the right; triangles represent corresponding target sites and coverage data from whole-genome SMRT sequencing reads from an isolated clone, aligned to the E. coli BL21(DE3) reference genome (bottom). FIG. 14B is 10-kb deletion data, shown as in FIG. 14A. FIG. 14C is 20-kb deletion data, shown as in FIG. 14A.

[0033] FIGS. 15A-15F shows Genome-wide analysis of RNA-guided DNA integration in K. oxytoca and P. putida. FIG. 15A is genome-wide distribution of genome-mapping Tn-seq reads for the indicated crRNA expressed by pSPIN-BBR1 in K. oxytoca; the target site is denoted by a maroon triangle. FIG. 15B is genome-wide distribution of genome-mapping Tn-seq reads for the indicated crRNA expressed by pSPIN-BBR1 in P. putida; the target site is denoted by a maroon triangle. ‡, off-target integration site. FIG. 15C is integration site distributions for the indicated crRNAs in K. oxytoca, determined from the Tn-seq data; the distance between the target site and mini-Tn insertion site is shown. Data for both integration orientations are superimposed, with filled blue bars and dark outlines representing T-RL and T-LR, respectively. Values in the top-right corner of each graph give the on-target specificity (%), calculated as the percentage of reads resulting from integration within 100 bp of the primary integration site compared to all genome-mapping reads, and the orientation bias (X:Y), calculated as the ratio of T-RL:T-LR reads within the on-target window. FIG. 15D is integration site distributions for the indicated crRNAs in P. putida, shown as in FIG. 15C. FIG. 15E is integration site distributions for the off-target peak (‡) with crRNA-51 in P. putida, shown in FIG. 15C. The sequences of the on-target and off-target sequences upstream of the integration site are shown to the right, highlighting the high degree of sequence similarity. FIG. 15F is integration site distributions for the indicated crRNAs in P. putida, shown as in FIG. 15D; these experiments utilized the reversed pSPIN-R plasmid, as compared to the pSPIN plasmid used in FIG. 15D.

[0034] FIG. 16 is a Flowchart for the INTEGRATE guide RNA design algorithm. Spacers with a defined length and PAM are generated and filtered from a given reference genome, based on the target gene name or genomic coordinates. The Bowtie2 alignment tool60 is used to evaluate each spacer candidate for potential off-targets genome-wide. Spacers are considered to have potential off-targets when Bowtie2 detects alignments exhibiting less than a user-specified maximum mismatch limit. For bacterial genomes, this process usually results in a sufficient number of spacers within each window, without the need for scoring each spacer candidate. For Type I Cascade (such as VchINT) spacers, the program converts flexible bases—those bases occurring every 6th position, which do not contribute to spacer-protospacer complementarity within the R-loop—to ‘N’ to exclude these bases from contributing to the mismatch count for the genome-wide off-target search. The off-target search module can also be executed separately for the evaluation of user-specified spacers. The program and more in-depth documentation are publicly accessible via GitHub (github.com/sternberglab/INTEGRATEguide-RNA-tool).

[0035] FIGS. 17A-17F show in vivo kinetics of RNA-guided transposition. FIG. 17A are graphs of integration over a 24-h time course at either 30 or 37° C., using pSPIN encoding crRNA-4 driven by either a strong (J23119, left) or weak (J23114, right) promoter. At each time point, integration efficiencies and culture growth states were determined by qPCR (top) and OD600 (bottom) measurements, respectively. FIG. 17B is a graph of integration for the 37° C. culture from FIG. 17A (J23119 promoter) was diluted 1:200 into fresh LB media at the indicated timepoint. Integration efficiencies and culture growth states were determined as in FIG. 17A. FIG. 17C is PCR analysis of T-RL integration for samples collected from the 37° C. cultures in FIG. 17A. Integration can be detected within 2 hours after transformation. FIG. 17D is a schematic of a transposition experiment where integration was performed using pEffector-B and a transposon donor delivered as a purified linear PCR amplicon. The mini-Tn encodes a chloramphenicol resistance cassette. FIG. 17E is PCR analysis of T-RL integration at target-4 from transposition assays using a linear PCR amplicon mini-Tn. Integration was readily detected in 6/6 colonies selected for chloramphenicol resistance. FIG. 17F is a graph of quantification of colony forming units (CFU) on LB chloramphenicol plates from transposition experiments using linear PCR amplicon mini-Tn and pEffector-B encoding either crRNA-4 or a non-targeting (NT) crRNA. Data in FIGS. 17A and 17B are shown as mean±s.d. for n=3 biologically independent samples.

[0036] FIGS. 18A-18F show Programmable integration within a complex bacterial community. FIG. 18A is a schematic of an exemplary experiment, in which pSPIN is delivered by conjugation from a donor E. coli strain into a complex bacterial community derived from the mouse gut. pSPIN was designed to specifically target the IacZ locus of K. oxytoca strain M5a1, which was added to the community before conjugation. FIG. 18B is 16S sequencing indicating that the gut microbiome communities 1 and 2 (C1 and C2, extracted from B6 and BALB/C mice, respectively) had diverse taxa. The barplots represent the relative abundance of different phyla in the commensal communities when donor and recipients were first introduced (Time 0 h) and 24 h after anaerobic growth in MGAM (Time 24 h). Data represent the average of three replicates. FIG. 18C is the PCR analysis of T-RL integration into the K. oxytoca lacZ target site from a population of recipient cells. Integration occurs robustly across both communities with the targeting crRNA (crRNA-41) but not a non-targeting (NT) crRNA. PCR products are shown for three biological replicates of conjugation experiments with communities 1 and 2, and for two distinct donor-to-recipient ratios tested. FIG. 18D is the Sanger sequencing of a representative PCR product from FIG. 18C confirming site-specific integration into the target K. oxytoca lacZ locus. The imperfect alignment observed at the genome-transposon junction is characteristic of variable integration sites across the population 35. FIG. 18E is representative T-RL PCR products assayed from isolated K. oxytoca colonies after the conjugation experiments into community 2. Integration is detected in 10/10 colonies. Colonies were obtained from LB agar plates with selection for pSPIN (but not for the integration event), and were confirmed to be K. oxytoca by independent 16S Sanger sequencing. FIG. 18F is a graph of the quantification of K. oxytoca colonies that underwent targeted integration by PCR analysis of T-RL. 40-66 colonies were analyzed for each conjugation condition, and colonies were confirmed to be K. oxytoca by independent 16S Sanger sequencing. Data in FIG. 18F are shown as mean±s.d. for n=3 biologically independent samples.

[0037] FIG. 19 is a chart of the protein sequence similarity between different transposase systems. Analysis was performed using BLASTp with default options. TnsA was not analyzed as both shCAST and ShoINT systems lack TnsA.

[0038] FIG. 20 is a chart of bacterial species and strains.

[0039] FIG. 21 is a zoomed-in view for the bile salt hydrolase (BSH) gene from Bacteroides vulgatus showing the three spacer-matching sites. The three sites targeted by Bacteroides Spacer1, Spacer2, and Spacer3 are shown, within the context of the BSH gene.

[0040] FIG. 22 is an image of the junction PCR analysis of targeted integration products from Bacteroides vulgatus transconjugants after delivery of pSPIN encoding a guide RNA with Spacer1. Primers were designed to amplify either tRL or tLR products after targeted integration programmed by a guide RNA with Spacer1, in which the transposon is integrated with either the ‘right’ or ‘left’ end proximal to the target site, respectively. Primer pairs comprise a genome-specific primer and a donor DNA-specific primer. The expected band sizes for on-target insertion products are ˜0.75-1.0 kb for the two orientations. Each lane underneath the “RL” and “LR” regions represents a singly transconjugant colony subjected to junction PCR analysis. Representative bands were subsequently excised and analyzed by Sanger sequencing.

[0041] FIG. 23 is an image of the junction PCR analysis of targeted integration products from Bacteroides vulgatus transconjugants after delivery of pSPIN encoding a guide RNA with Spacer2. Primers were designed to amplify either tRL or tLR products after targeted integration programmed by a guide RNA with Spacer2, in which the transposon is integrated with either the ‘right’ or ‘left’ end proximal to the target site, respectively. Primer pairs comprise a genome-specific primer and a donor DNA-specific primer. The expected band sizes for on-target insertion products are ˜0.75-1.0 kb for the two orientations. Each lane underneath the “RL” and “LR” regions represents a singly transconjugant colony subjected to junction PCR analysis. Representative bands were subsequently excised and analyzed by Sanger sequencing. This spacer has a clear bias for tRL integration products.

[0042] FIG. 24 is an image of the junction PCR analysis of targeted integration products from Bacteroides vulgatus transconjugants after delivery of pSPIN encoding a guide RNA with Spacer3. Primers were designed to amplify either tRL or tLR products after targeted integration programmed by a guide RNA with Spacer3, in which the transposon is integrated with either the ‘right’ or ‘left’ end proximal to the target site, respectively. Primer pairs comprise a genome-specific primer and a donor DNA-specific primer. The expected band sizes for on-target insertion products are ˜0.75-1.0 kb for the two orientations. Each lane underneath the “RL” and “LR” regions represents a singly transconjugant colony subjected to junction PCR analysis. Representative bands were subsequently excised and analyzed by Sanger sequencing. This spacer has a clear bias for tRL integration products.

[0043] FIG. 25 is the Sanger sequencing verification of on-target tRL product upon RNA-guided DNA integration in the Bacteroides vulgatus genome (SEQ ID NO: 261), after delivery of pSPIN encoding a guide RNA with Spacer1. Sanger sequencing chromatograms are shown using primers extending from either end of the junction PCR products, denoted here as “Forward read” and “Reverse read.” The chromatograms are aligned to a reference genome, showing the precise insertion of the transposon ‘left end’ (or left flank) 49-bp downstream of the genomic site complementary to the spacer. The target site duplication (TSD) is indicated.

[0044] FIG. 26 is the Sanger sequencing verification of on-target tRL product upon RNA-guided DNA integration in the Bacteroides vulgatus genome (SEQ ID NO: 262), after delivery of pSPIN encoding a guide RNA with Spacer2. Sanger sequencing chromatograms are shown using primers extending from either end of the junction PCR products, denoted here as “Forward read” and “Reverse read.” The chromatograms are aligned to a reference genome, showing the precise insertion of the transposon ‘left end’ (or left flank) 49-bp downstream of the genomic site complementary to the spacer. The target site duplication (TSD) is indicated.

[0045] FIG. 27 is the Sanger sequencing verification of on-target tRL product upon RNA-guided DNA integration in the Bacteroides vulgatus genome (SEQ ID NO: 263), after delivery of pSPIN encoding a guide RNA with Spacer3. Sanger sequencing chromatograms are shown using primers extending from either end of the junction PCR products, denoted here as “Forward read” and “Reverse read.” The chromatograms are aligned to a reference genome, showing the precise insertion of the transposon ‘left end’ (or left flank) 50-bp downstream of the genomic site complementary to the spacer. The target site duplication (TSD) is indicated.

### DETAILED DESCRIPTION

[0046] The disclosed systems, kits, compositions, and methods advance RNA-guided nucleic acid integration for efficient and multiplexed bacterial genome engineering.

[0047] DNA technologies to stably integrate genes and pathways into the genome enable the generation of engineered cells with entirely new functions. Applications of this powerful approach have already yielded impactful commercial products, with examples including CAR-T cell therapies, genetically modified crops, and cell factories producing diverse compounds and medicines. In many of these applications, genomic integration is highly preferred over plasmid-based methods for maintaining heterologous genes in engineered cells, due to improved stability in the genome, better control of copy numbers, and regulatory concerns regarding biocontainment of recombinant DNA. However, generation of modified cells with kilobases of changes across the genome remains practically challenging, often requiring inefficient, multi-step processes that are time and resource intensive.

[0048] In bacteria, genome engineering and integration can be achieved through several approaches that utilize endogenous or foreign integrases, transposases, recombinases, or homologous recombination (HR) machinery, which can be further combined with CRISPR-Cas to improve efficiency. While widely used, these methods are not without significant drawbacks. For example, recombination-mediated genetic engineering (recombineering) using X-red or RecET recombinase systems in E. coli allows programmable genomic integrations, specified by the homology arms flanking the foreign DNA cassette. However, recombineering efficiency is generally low (less than 1 in 103-104) without selection of a co-integrating selectable marker or CRISPR-Cas-mediated counter-selection of unedited alleles, and thus cannot be easily multiplexed to make simultaneous insertions into the same cell. There is a limited number of robust selectable markers (e.g., antibiotic resistance genes) that require another excision step to remove from the genome for subsequent reuse, and expression of Cas9 for negative selection can cause unintended DNA double-strand breaks (DSBs) that lead to cytotoxicity. Practically, recombineering has a payload size limit of only 3-4 kb in many cases, making it less useful for genomic integration of pathway-sized DNA cassettes. Finally, unknown requirements for host-specific factors or cross-species incompatibilities of phage recombination proteins have rendered E. coli recombineering systems more challenging to port to other bacteria, requiring significant species-specific optimizations or screening of new recombinases.

[0049] Other integrases and transposases, such as ICEBs and Tn7, have also been used for genome integration. These systems recognize highly specific attachment sites that are unfortunately difficult to reprogram, and thus require the prior presence of these sites or their separate introduction in the genome. Other more portable transposons, such as Mariner and Tn5, generate non-specific integrations that have been used for genome-wide transposon mutagenesis libraries. However, these transposases cannot be targeted to specific genomic loci, and large-scale screens are needed to isolate desired clones. More recently, a catalytically-dead Cas9 has been fused to either a transposase or a recombinase to provide better site specificity, which showed success in mostly in vitro studies. Autocatalytic Group II RNA introns, selfish genetic elements in bacteria, have also been used for genomic transpositions and insertions. This system utilizes an RNA intermediate to guide insertions, but suffers from inconsistent efficiencies ranging from 1-80% depending on the target site and species, and a limited cargo size of 1.8 kb.

[0050] A new category of programmable integrases was recently described in which sequence specificity is governed exclusively by guide RNAs. Motivated by the bioinformatic description of Tn7-like transposons encoding nuclease-deficient CRISPR-Cas systems, a candidate CRISPR-transposon from Vibrio cholerae (Tn6677) was selected and RNA-guided transposition was reconstituted in an E. coli host. DNA integration occurred ˜47-51 base pairs (bp) downstream of the genomic site targeted by the CRISPR RNA (crRNA), and required transposition proteins TnsA, TnsB, and TnsC, in conjunction with the RNA-guided DNA targeting complex TniQ-Cascade. Remarkably, bacterial transposons have hijacked at least three distinct CRISPR-Cas subtypes. The Type V-K effector protein. Cas12k, also directs targeted DNA integration, albeit with lower fidelity.

[0051] INTEGRATE (insertion of transposable elements by guide RNA-assisted targeting) benefits from both the high-efficiency, seamless integrations of transposases, as well as the simple programmability of CRISPR-mediated targeting. However, the system previously demonstrated in E. coli required multiple cumbersome genetic components and displayed low efficiency for larger insertions in dual orientations. Herein, an improved INTEGRATE system was developed that used streamlined expression vectors to direct highly accurate insertions at ˜100% efficiency, effectively in a single orientation, independent of the cargo size, without requiring selection markers.

[0052] Since INTEGRATE does not rely on homology arms specific to each target site, multiple simultaneous genomic insertions into the same cell could be rapidly generated using CRISPR arrays with multiple targeting spacers, and INTEGRATE paired with Cre-Lox was used to achieve genomic deletions. Using INTEGRATE is preferable for efficient and targetable genomic deletions in both prokaryotic and eukaryotic nucleic acids over previous methods due to the mechanism of action not utilizing double-strand breaks in the target nucleic acid, particularly in bacteria, and selective targeting to a nucleic acid sequence of interest for deletion. This allows a single construct to be employed in a plurality of bacteria or bacterial species for simultaneous deletions of the exact genomic region in each individual bacterium.

[0053] The portability and high site specificity of INTEGRATE was demonstrated in other species, including Klebsiella oxytoca, Pseudomonas putida, and Bacteroides vulgatus highlighting its broad utility for bacterial genome engineering. INTEGRATE was an effective genetic tool for engineering specific strands in a complex mammalian gut microbiome.

[0054] Section headings as used in this section and the entire disclosure herein are merely for organizational purposes and are not intended to be limiting.

### 1. DEFINITIONS

[0055] The terms “comprise(s),” “include(s),” “having.” “has,” “can,” “contain(s).” and variants thereof, as used herein, are intended to be open-ended transitional phrases, terms, or words that do not preclude the possibility of additional acts or structures. The singular forms “a,” “and” and “the” include plural references unless the context clearly dictates otherwise. The present disclosure also contemplates other embodiments “comprising,” “consisting of” and “consisting essentially of,” the embodiments or elements presented herein, whether explicitly set forth or not.

[0056] For the recitation of numeric ranges herein, each intervening number there between with the same degree of precision is explicitly contemplated. For example, for the range of 6-9, the numbers 7 and 8 are contemplated in addition to 6 and 9, and for the range 6.0-7.0, the number 6.0, 6.1, 6.2, 6.3, 6.4, 6.5, 6.6, 6.7, 6.8, 6.9, and 7.0 are explicitly contemplated.

[0057] Unless otherwise defined herein, scientific, and technical terms used in connection with the present disclosure shall have the meanings that are commonly understood by those of ordinary skill in the art. For example, any nomenclature used in connection with, and techniques of, cell and tissue culture, molecular biology, immunology, microbiology, genetics and protein and nucleic acid chemistry and hybridization described herein are those that are well known and commonly used in the art. The meaning and scope of the terms should be clear; in the event, however of any latent ambiguity, definitions provided herein take precedent over any dictionary or extrinsic definition. Further, unless otherwise required by context, singular terms shall include pluralities and plural terms shall include the singular.

[0058] As used herein, a “nucleic acid” or a “nucleic acid sequence” refers to a polymer or oligomer of pyrimidine and/or purine bases, preferably cytosine, thymine, and uracil, and adenine and guanine, respectively (See Albert L. Lehninger, Principles of Biochemistry, at 793-800 (Worth Pub. 1982)). The present technology contemplates any deoxyribonucleotide, ribonucleotide, or peptide nucleic acid component, and any chemical variants thereof, such as methylated, hydroxymethylated, or glycosylated forms of these bases, and the like. The polymers or oligomers may be heterogenous or homogenous in composition and may be isolated from naturally occurring sources or may be artificially or synthetically produced. In addition, the nucleic acids may be DNA or RNA, or a mixture thereof, and may exist permanently or transitionally in single-stranded or double-stranded form, including homoduplex, heteroduplex, and hybrid states. In some embodiments, a nucleic acid or nucleic acid sequence comprises other kinds of nucleic acid structures such as, for instance, a DNA/RNA helix, peptide nucleic acid (PNA), morpholino nucleic acid (see, e.g., Braasch and Corey, Biochemistry, 41(14): 4503-4510 (2002)) and U.S. Pat. No. 5,034,506), locked nucleic acid (LNA; see Wahlestedt et al., Proc. Natl. Acad. Sci. U.S.A., 97: 5633-5638 (2000)), cyclohexenyl nucleic acids (see Wang, J. Am. Chem. Soc., 122: 8595-8602 (2000)), and/or a ribozyme. Hence, the term “nucleic acid” or “nucleic acid sequence” may also encompass a chain comprising non-natural nucleotides, modified nucleotides, and/or non-nucleotide building blocks that can exhibit the same function as natural nucleotides (e.g., “nucleotide analogs”); further, the term “nucleic acid sequence” as used herein refers to an oligonucleotide, nucleotide or polynucleotide, and fragments or portions thereof, and to DNA or RNA of genomic or synthetic origin, which may be single or double-stranded, and represent the sense or antisense strand. The terms “nucleic acid,” “polynucleotide,” “nucleotide sequence,” and “oligonucleotide” are used interchangeably. They refer to a polymeric form of nucleotides of any length, either deoxyribonucleotides or ribonucleotides, or analogs thereof.

[0059] Nucleic acid or amino acid sequence “identity.” as described herein, can be determined by comparing a nucleic acid or amino acid sequence of interest to a reference nucleic acid or amino acid sequence. The percent identity is the number of nucleotides or amino acid residues that are the same (e.g., that are identical) as between the sequence of interest and the reference sequence divided by the length of the longest sequence (e.g., the length of either the sequence of interest or the reference sequence, whichever is longer). A number of mathematical algorithms for obtaining the optimal alignment and calculating identity between two or more sequences are known and incorporated into a number of available software programs. Examples of such programs include CLUSTAL-W. T-Coffee, and ALIGN (for alignment of nucleic acid and amino acid sequences), BLAST programs (e.g., BLAST 2.1, BL2SEQ, and later versions thereof) and FASTA programs (e.g., FASTA3×, FAST™, and SSEARCH) (for sequence alignment and sequence similarity searches). Sequence alignment algorithms also are disclosed in, for example, Altschul et al., J. Molecular Biol., 215(3): 403-410 (1990), Beigert et al., Proc. Natl. Acad. Sci. USA, 106(10): 3770-3775 (2009), Durbin et al., eds., Biological Sequence Analysis: Probabilistic Models of Proteins and Nucleic Acids, Cambridge University Press, Cambridge, UK (2009), Soding, Bioinformatics, 21(7): 951-960 (2005), Altschul et al., Nucleic Acids Res., 25(17): 3389-3402 (1997), and Gusfield, Algorithms on Strings, Trees and Sequences, Cambridge University Press. Cambridge UK (1997)).

[0060] The terms “microbe” or microorganism” are used interchangeably herein to refer to prokaryotic and eukaryotic microbial species from the domains Archaea, Bacteria and Eucarya, the latter including yeast and filamentous fungi, protozoa, algae, and higher Protista. “Microbial cells” refer to cells derived from a microbe or microorganism, as defined herein, or, in the case of single-celled organisms, the organism itself.

[0061] A “vector” or “expression vector” is a replicon, such as plasmid, phage, virus, or cosmid, to which another DNA segment, e.g., an “insert,” may be attached or incorporated so as to bring about the replication of the attached segment in a cell.

[0062] A “subject” or “patient” may be human or non-human and may include, for example, animal strains or species used as “model systems” for research purposes, such a mouse model as described herein. Likewise, patient may include either adults or juveniles (e.g., children). Moreover, patient may mean any living organism, preferably a mammal (e.g., human or non-human) that may benefit from the administration of compositions contemplated herein. Examples of mammals include, but are not limited to, any member of the Mammalian class: humans, non-human primates such as chimpanzees, and other apes and monkey species; farm animals such as cattle, horses, sheep, goats, swine; domestic animals such as rabbits, dogs, and cats; laboratory animals including rodents, such as rats, mice and guinea pigs, and the like. Examples of non-mammals include, but are not limited to, birds, fish, and the like. In one embodiment of the methods and compositions provided herein, the mammal is a human.

[0063] As used herein, the terms “providing,” “administering,” “introducing,” are used interchangeably herein and refer to the placement of the systems of the disclosure into a subject by a method or route which results in at least partial localization of the system to a desired site. The systems can be administered by any appropriate route which results in delivery to a desired location in the subject.

### 2. SYSTEM FOR TARGETED NUCLEIC ACID DELETIONS

[0064] Disclosed herein are systems or kits for targeted nucleic acid deletions comprising: an engineered Clustered Regularly Interspaced Short Palindromic Repeats (CRISPR)-CRISPR associated (Cas) (CRISPR-Cas) system, and/or one or more vectors encoding the engineered CRISPR-Cas system, wherein the engineered CRISPR-Cas system comprises: (a) at least one Cas protein, and (b) a pair of guide RNAs (gRNAs), wherein the pair of gRNAs is configured to hybridize to target sites flanking a nucleic acid sequence for deletion; an engineered transposon system, and/or one or more vectors encoding the engineered transposon system: a recombinase, or catalytic domain thereof, and/or one or more vectors encoding a recombinase, or catalytic domain thereof; and at least one donor nucleic acid to be integrated, wherein the donor nucleic acid comprises a recognition site for the recombinase flanked by at least one transposon end sequence. The system may further comprise a target nucleic acid comprising the nucleic acid sequence for deletion.

[0065] The system may be a cell free system. Also disclosed is a cell comprising the system described herein. In some embodiments, the cell is a prokaryotic cell. In some embodiments, the cell is a eukaryotic cell. In some embodiments, the cell is a mammalian cell, a cell of a non-human primate, or a human cell. In some embodiments, the cell is a plant cell.

[0066] a. Recombinase

[0067] The term “recombinase,” as used herein, refers to a site-specific enzyme that mediates the recombination of DNA between recombinase recognition sequences, which results in the excision, integration, inversion, or exchange (e.g., translocation) of DNA fragments between the recombinase recognition sequences. Recombinases can be classified into two distinct families: serine recombinases (e.g., resolvases and invertases) and tyrosine recombinases (e.g., integrases). Examples of serine recombinases include, without limitation, Hin, Gin, Tn3 (also known as TnpR), β-six, CinH, ParA, γδ, Bxb1, ϕC31, TP901, TG1, ϕBT1, ϕR4, ϕRV1, ϕFC1, MR11, A118, U153, and gp29. Examples of tyrosine recombinases include, without limitation, Cre, FLP, R, Lambda, HK101, HK022, and pSAM2. The serine and tyrosine recombinase names stem from the conserved nucleophilic amino acid residue that the recombinase uses to attack the DNA and which becomes covalently linked to the DNA during strand exchange. The recombinases provided herein are not meant to be exclusive examples of recombinases that can be used in embodiments of the invention. The methods and compositions of the invention can be expanded by mining databases for new orthogonal recombinases or designing synthetic recombinases with defined DNA specificities (See, e.g., Groth et al., “Phage integrases: biology and applications.” J. Mol. Biol. 2004: 335, 667-678; Gordley et al., “Synthesis of programmable integrases.” Proc. Natl. Acad. Sci. USA. 2009; 106, 5053-5058; the entire contents of each are hereby incorporated by reference in their entirety). Other examples of recombinases that are useful in the methods and compositions described herein are known to those of skill in the art, and any new recombinase that is discovered or generated is expected to be able to be used in the different embodiments of the invention. In some embodiments, the recombinase is a serine recombinase. In some embodiments, the recombinase is a tyrosine recombinase.

[0068] In some embodiments, the catalytic domains of a recombinase are fused to another protein or provided alone. Recombinases such as this are known, and include those described by Klippel et al., EMBO J. 1988; 7: 3983-3989: Burke et al., Mol Microbiol. 2004; 51: 937-948; Olorunniji et al., Nucleic Acids Res. 2008; 36: 7181-7191; Rowland et al., Mol Microbiol. 2009; 74: 282-298; Akopian et al., Proc Natl Acad Sci USA. 2003; 100: 8688-8691; Gordley et al., J Mol Biol. 2007; 367: 802-813; Gordley et al., Proc Natl Acad Sci USA. 2009; 106: 5053-5058; Arnold et al., EMBO J. 1999; 18: 1407-1414; Gaj et al., “Proc Natl Acad Sci USA. 2011; 108(2):498-503; and Proudfoot et al., PLoS One. 2011; 6(4):e19537; the entire contents of each are hereby incorporated by reference. For example, serine recombinases of the resolvase-invertase group, e.g., Tn3 and γδ resolvases and the Hin and Gin invertases, have modular structures with autonomous catalytic and DNA-binding domains (See, e.g., Grindley et al., Ann Rev Biochem. 2006; 75: 567-605, the entire contents of which are incorporated by reference). The catalytic domains of these recombinases are thus amenable to being in protein fusions. Additionally, many other natural serine recombinases having an N-terminal catalytic domain and a C-terminal DNA binding domain are known (e.g., phiC31 integrase, TnpX transposase, IS607 transposase), and their catalytic domains can be co-opted to engineer programmable site-specific recombinases. Similarly, the core catalytic domains of tyrosine recombinases (e.g., Cre, λ integrase) are known, and can be similarly co-opted to engineer programmable site-specific recombinases as described herein.

[0069] In some embodiments, the recombinase comprises Cre recombinase, a mutant, variant, or catalytic domain thereof and the recognition site is a Lox site or variant thereof. In certain embodiments, the Cre recombinase comprises an amino acid sequence of at least 70% identity (e.g., 75%, 80%, 85%, 90%, 95% or 99% identity) to SEQ ID NO: 243. In select embodiments, the Cre recombinase comprises an amino acid sequence of at least 70% identity to SEQ ID NO: 251. In some embodiments, the vector encoding the Cre recombinase comprises a nucleic acid sequence having at least 70% identity to SEQ ID NO: 252 or 253.

SEQ ID NO: 243
PKKKRKVSNLLTVHQNLPALPVDATSDEVRKNLMDMFRDRQAFSEHTWK
MLLSVCRSWAAWCKLNNRKWFPAEPEDVRDYLLYLQARGLAVKTIQQHL
GQLNMLHRRSGLPRPSDSNAVSLVMRRIRKENVDAGERAKQALAFERTD
FDQVRSLMENSDRCQDIRNLAFLGIAYNTLLRIAEIARIRVKDISRTDG
GRMLIHIGRTKTLVSTAGVEKALSLGVTKLVERWISVSGVADDPNNYLF
CRVRKNGVAAPSATSQLSTRALEGIFEATHRLIYGAKDDSGQRYLAWSG
HSARVGAARDMARAGVSIPEIMQAGGWTNVNIVMNYIRNLDSETGAMVR
LLEDGD
SEQ ID NO: 251
MGSSHHHHHHSSGLVPRGSHGGGSAAAMGTRLPKKKRKVSNLLTVHQNL
PALPVDATSDEVRKNLMDMFRDRQAFSEHTWKMLLSVCRSWAAWCKLNN
RKWFPAEPEDVRDYLLYLQARGLAVKTIQQHLGQLNMLHRRSGLPRPSD
SNAVSLVMRRIRKENVDAGERAKQALAFERTDFDQVRSLMENSDRCQDI
RNLAFLGIAYNTLLRIAEIARIRVKDISRTDGGRMLIHIGRTKTLVSTA
GVEKALSLGVTKLVERWISVSGVADDPNNYLFCRVRKNGVAAPSATSQL
STRALEGIFEATHRLIYGAKDDSGQRYLAWSGHSARVGAARDMARAGVS
IPEIMQAGGWTNVNIVMNYIRNLDSETGAMVRLLEDGD

[0070] The recognition site for Cre recombinase may include any known Lox sequence or sequence variant. See for example, Missirlis, P I, et al., BMC Genomics, 7:73 (2006), incorporated herein by reference in its entirety. In certain embodiments, the Lox site comprises a nucleic acid sequence of at least 70% identity to SEQ ID NO: 244.

SEQ ID NO: 244
ATAACTTCGTATAGCATACATTATACGAAGTTAT

[0071] In some embodiments, the recombinase comprises flippase (FLP) recombinase, a mutant, variant, or catalytic domain thereof and the recognition site is a flippase recognition target (FRT) site or variant thereof. In certain embodiments, the FLP recombinase comprises an amino acid sequence of at least 70% identity (e.g., 75%, 80%, 85%, 90%, 95% or 99% identity) to SEQ ID NO: 245. In some embodiments, the nucleic acid encoding the FLP recombinase comprises a nucleic acid sequence having at least 70% identity to SEQ ID NO: 254.

SEQ ID NO: 245
MPQFDILCKTPPKVLVRQFVERFERPSGEKIALCAAELTYLCWMITHNGT
AIKRATFMSYNTIISNSLSFDIVNKSLQFKYKTQKATILEASLKKLIPAW
EFTIIPYYGQKHQSDITDIVSSLQLQFESSEEADKGNSHSKKMLKALLSE
GESIWEITEKILNSFEYTSRFTKTKTLYQFLFLATFINCGRFSDIKNVDP
KSFKLVQNKYLGVIIQCLVTETKTSVSRHIYFFSARGRIDPLVYLDEFLR
NSEPVLKRVNRTGNSSSNKQEYQLLKDNLVRSYNKALKKNAPYSIFAIKN
GPKSHIGRHLMTSFLSMKGLTELTNVVGNWSDKRASAVARTTYTHQITAI
PDHYFALVSRYYAYDPISKEMIALKDETNPIEEWQHIEQLKGSAEGSIRY
PAWNGNSQEVLDYLSSYINRRI

[0072] Several variant FRT sites exist (see Schlake T, et al., Biochemistry 33 (43): 12746-51 (1994), Senecoff J F, et al., Journal of Molecular Biology. 201 (2): 405-21 (1988) and Turan S, et al., Journal of Molecular Biology 402 (1): 52-69 (2010)) and are compatible with the systems and methods described herein. In certain embodiments, the FRT site comprises a nucleic acid sequence of at least 70% identity to SEQ ID NO: 246.

SEQ ID NO: 246
GAAGTTCCTATTCTCTAGAAAGTATAGGAACTTC

[0073] In some embodiments, the recombinase comprises TniR resolvase, a mutant, variant, or catalytic domain thereof and the recognition site comprises a resolution (res) sequence or variant thereof. In certain embodiments, the TniR resolvase comprises an amino acid sequence of at least 70% identity (e.g., 75%, 80%. 85%, 90%, 95% or 99% identity) to SEQ ID NO: 247. In some embodiments, the nucleic acid encoding the TniR resolvase comprises a nucleic acid sequence having at least 70% identity to SEQ ID NO: 255.

SEQ ID NO: 247
MLIGYMRVSKADGSQATDLQRDALIAAGVDPVHLYEDQASGMREDRPGL
TSCLKALRTGDTLVVWKLDRLGRDLRHLINTVHDLTGRGIGLKVLTGHG
AAIDTTTAAGKLVFGIFAALAEFERELIAERTIAGLASARARGRKGGRP
FKMTAAKLRLAMAAMGQPETKVGDLCQELGVTRQTLYRHVSPKGELRPD
GEKLLSRI

[0074] The sequence of any known TniR res site may be used with the system and methods described herein. In certain embodiments, the res sequence comprises a nucleic acid sequence of at least 70% identity to SEQ ID NO: 248.

SEQ ID NO: 248
CGGCGAGAACTTTCTGGCTCACACTGTCACATAATCGAACGTATATGTG
ACAGGTACGAC

[0075] In some embodiments, the recombinase comprises a recombinase from a Tn3-like system (e.g., Tn3 resolvase), also known as TnpR, a mutant, variant, or catalytic domain thereof and the recognition site comprises a resolution (res) sequence or variant thereof. In certain embodiments, the Tn3-like resolvase comprises an amino acid sequence of at least 70% identity (e.g., 75%, 80%, 85%, 90%, 95% or 99% identity) to SEQ ID NO: 249. In some embodiments, the nucleic acid encoding a Tn3 resolvase comprises a nucleic acid sequence having at least 70% identity to SEQ ID NO: 256.

SEQ ID NO: 249
MRLFGYARVSTSQQSLDLQVRALKDAGVKANRIFTDKASGSSTDREGLD
LLRMKVEEGDVILVKKLDRLGRDTADMIQLIKEFDAQGVAVRFIDDGIS
TDGDMGQMVVTILSAVAQAERRRILERTNEGRQEAKLKGIKFGRRRTVD
RNVVLTLHQKGTGATEIAHQLSIARSTVYKILEDERAS

[0076] The sequence of any known Tn3-like resolvase res site may be used with the system and methods described herein (See e.g., Grindley N D, et al., Cell 30:19-27 (1982), incorporated herein by reference in its entirety). In certain embodiments, the res sequence comprises a nucleic acid sequence of at least 70% identity to SEQ ID NO: 250.

SEQ ID NO: 250
CCGTACGAAATGTTATAAATTATCGGACATCGTAAAACTGTTACATTAA
TATGTCTATTAAATCGTAAATTTGTAATAATAGACATGAGTTGTCCGAT
ATTCGATTTAAGGTACATTTTT

[0077] b. Donor DNA

[0078] The donor DNA may be a part of a bacterial plasmid, bacteriophage, plant virus, retrovirus, DNA virus, autonomously replicating extra chromosomal DNA element, linear plasmid, mitochondrial or other organellar DNA, chromosomal DNA, and the like. In some embodiments, the donor nucleic acid comprises a human nucleic acid sequence.

[0079] The donor DNA comprises a recognition site for the recombinase, described elsewhere herein, flanked by at least one transposon end sequence. In some embodiments, the donor DNA further comprises a cargo nucleic acid. In some embodiments, the cargo nucleic acid comprises the recognition site for the recombinase. Put another way, the recognition site for the recombinase is within the cargo nucleic acid. The term “transposon end sequence” refers to any nucleic acid comprising a sequence capable of forming a complex with the transposase enzymes thus designating the DNA between the ends, the donor DNA, for rearrangement. Usually, these sequences are inverted repeats about 9 to 40 base pairs long, however the exact sequence requirements differ for the specific transposase enzymes. Transposon end sequences are well known in the art. Transposon ends sequences may or may not include additional sequences that promote or augment transposition.

[0080] The donor DNA, and by extension the cargo nucleic acid, may of any suitable length, including, for example, about 50-100 bp (base pairs), about 100-1000 bp, at least or about 10 bp, at least or about 20 bp, at least or about 25 bp, at least or about 30 bp, at least or about 35 bp, at least or about 40 bp, at least or about 45 bp, at least or about 50 bp, at least or about 55 bp, at least or about 60 bp, at least or about 65 bp, at least or about 70 bp, at least or about 75 bp, at least or about 80 bp, at least or about 85 bp, at least or about 90 bp, at least or about 95 bp, at least or about 100 bp, at least or about 200 bp, at least or about 300 bp, at least or about 400 bp, at least or about 500 bp, at least or about 600 bp, at least or about 700 bp, at least or about 800 bp, at least or about 900 bp, at least or about 1 kb (kilobase pair), at least or about 2 kb, at least or about 3 kb, at least or about 4 kb, at least or about 5 kb, at least or about 6 kb, at least or about 7 kb, at least or about 8 kb, at least or about 9 kb, at least or about 10 kb, or less than 10 kb, in length or greater. The donor DNA, and the cargo nucleic acid, may be at least or about 10 kb, at least or about 50 kb, at least or about 100 kb, between 20 kb and 60 kb, between 20 kb and 100 kb.

[0081] c. CRISPR-Cas System

[0082] In some embodiments, the present system may be derived from a Class 1 (e.g., Type I, Type III, Type VI) or a Class 2 (e.g., Type II, Type V, or Type VI) CRISPR-Cas system. In some embodiments, the present system may be derived from a Type I CRISPR-Cas system. In some embodiments, the present system may be derived from a Type V CRISPR-Cas system.

[0083] For example, Type I Cascade complexes may be used in the present methods and systems. Type I CRISPR-Cas systems encode a multi-subunit protein-RNA complex called Cascade, which utilizes a crRNA (or guide RNA) to target double-stranded DNA during an immune response. Cascade itself has no nuclease activity, and degradation of targeted DNA is instead mediated by a trans-acting nuclease known as Cas3. The Type I-F CRISPR-Cas systems and Type I-B CRISPR-Cas systems found within Tn7 transposons consistently lack the Cas3 gene, suggesting that these systems no longer retain any DNA degradation capabilities and have been reduced to RNA-guided DNA-binding complexes. Additionally, one of the core proteins used by Tn7 transposons for selection of DNA target sites for purposes of transposon mobility, TnsD (also known as TniQ), is conspicuously encoded by a gene sitting directly within the Cas gene operon in these systems, suggesting direct coupling or functional relationship between the Cascade complex encoded by Cas genes, and the transpososome enzymatic machinery encoded by Tn seven (Tns) transposase genes.

[0084] The system derived from Vibrio cholerae that harbors a Type I-F CRISPR-Cas system may be used with the present system and related methods. Other systems (for which the CRISPR-Cas systems are either categorized as Type I-F or I-B) may also be used with the present system and related methods. These include, without limitation, systems from Vibrio cholerae, Photobacterium iliopiscarium, Pseudoalteromonas sp. P1-25, Pseudoalteromonas ruthenica, Photobacterium ganghwense, Shewanella sp. UCD-KL21, Vibrio diazotrophicus, Vibrio sp. 16, Vibrio sp. F12, Vibrio splendidus, Aliivibrio wodanis, and Parashewanella spongiae.

[0085] The Type V systems that encode putative effector gene known as Cas 12k, formerly known as c2c5, may be used in the present methods and systems. The Type V systems encode a putative effector that may be a single protein functioning with a single gRNA. These may have different packaging size, assembly, nuclear localization, etc. Type V CRISPR-Cas systems fall within Class 2 systems, which rely on single-protein effectors together with guide RNA, and so it remains possible that the engineering strategies may be streamlined by using single-protein effectors like Cas12k, rather than the multi-subunit protein-RNA complexes encoded by type I systems, namely Cascade. These operons may be cloned into the same backbones.

[0086] The present system may comprise Cas12k. The present system may comprise Cas5, Cas6, Cas7 Cas8, or a combination thereof. In some embodiments, the Cas5 and Cas8 are linked as a functional fusion protein.

[0087] d. gRNA

[0088] The gRNA may be a crRNA, crRNA/tracrRNA (or single guide RNA, sgRNA).

[0089] The terms “gRNA,” “guide RNA” and “CRISPR guide sequence” may be used interchangeably throughout and refer to a nucleic acid comprising a sequence that determines the binding specificity of the CRISPR-Cas system. A gRNA hybridizes to (complementary to, partially or completely) a target nucleic acid sequence (e.g., the genome in a cell). The system may further comprise a target nucleic acid.

[0090] The gRNA or portion thereof that hybridizes to the target nucleic acid (a target site) may be any length necessary for selective hybridization. gRNAs or sgRNA(s) used in the present disclosure can be between about 5 and about 100 nucleotides long, or longer (e.g., 5, 6, 7, 8, 9, 10, 11, 12, 13, 14, 15, 16, 17, 18, 19, 20, 21, 22, 23, 24, 25, 26, 27, 28, 29, 30, 31, 32, 33, 34, 35, 36, 37, 38, 39, 40, 41, 42, 43, 44, 45, 46, 47, 48, 49, 50, 51, 52, 53, 54, 55, 56, 57, 58, 59, 60, 61, 62, 63, 63, 64, 65, 66, 67, 68, 69, 70, 71, 72, 73, 74, 75, 76, 77, 78, 79, 80, 81, 82, 83, 84, 85, 86, 87, 88, 89, 90, 91, 92, 93, 94, 95, 96, 97, 98, 99, or 100 nucleotides in length, or longer). In some embodiments, the gRNA or portion thereof that hybridizes to the target nucleic acid (a target site) may be between 15-40 nucleotides in length. In some embodiments, the gRNA sequence that hybridizes to the target nucleic acid is 15, 16, 17, 18, 19, 20, 21, 22, 23, 24, 25, 26, 27, 28, 29, 30, 31, 32, 33, 34, 35, 36, 37, 38, 39, or 40 nucleotides in length.

[0091] The pair of gRNAs may target the same strand, e.g., one target site at the 5′ and one target site at the 3′ end of the nucleic acid sequence for deletion. The pair of gRNAs may target opposite strands of the nucleic acid sequence for deletion. In some embodiments, at least one of the pair of guide RNAs is a non-naturally occurring gRNA. In some embodiments, each of the pair of guide RNAs is a non-naturally occurring gRNA.

[0092] To facilitate gRNA design, many computational tools have been developed (See Prykhozhij et al. (PLoS ONE, 10(3): (2015)), Zhu et al. (PLoS ONE, 9(9) (2014)), Xiao et al. (Bioinformatics. Jan. 21 (2014)); Heigwer et al. (Nat Methods, 11(2): 122-123 (2014)). Methods and tools for guide RNA design are discussed by Zhu (Frontiers in Biology, 10 (4) pp 289-296 (2015)), which is incorporated by reference herein. Additionally, there are many publicly available software tools that can be used to facilitate the design of sgRNA(s); including but not limited to, Genscript Interactive CRISPR gRNA Design Tool, WU-CRISPR, and Broad Institute GPP sgRNA Designer. There are also publicly available pre-designed gRNA sequences to target many genes and locations within the genomes of many species (human, mouse, rat, zebrafish, C. elegans), including but not limited to, IDT DNA Predesigned Alt-R CRISPR-Cas9 guide RNAs, Addgene Validated gRNA Target Sequences, and GenScript Genome-wide gRNA databases.

[0093] In some embodiments, an exemplary guide RNA design algorithm is as shown in FIG. 16. Based on a target nucleic acid (e.g., target gene name or genomic coordinates), spacers with a defined length and PAM are generated and filtered from a given reference genome. An alignment tool is used to evaluate each spacer candidate for potential off-targets genome-wide, as determined by a less than a user-specified maximum mismatch limit. The program is capable of converting flexible bases, e.g., which do not contribute to spacer-protospacer complementarity, to ‘N’ to exclude these bases from contributing to the mismatch count for the genome-wide off-target search. The off-target search module can also be executed separately for the evaluation of user-specified spacers.

[0094] In addition to a sequence that binds to a target nucleic acid, in some embodiments, the gRNA may also comprise a scaffold sequence (e.g., tracrRNA). In some embodiments, such a chimeric gRNA may be referred to as a single guide RNA (sgRNA). Exemplary scaffold sequences will be evident to one of skill in the art and can be found, for example, in Jinek, et al. Science (2012) 337(6096):816-821, and Ran, et al. Nature Protocols (2013) 8:2281-2308, incorporated herein by reference in their entireties.

[0095] In some embodiments, the gRNA sequence does not comprise a scaffold sequence and a scaffold sequence is expressed as a separate transcript. In such embodiments, the gRNA sequence further comprises an additional sequence that is complementary to a portion of the scaffold sequence and functions to bind (hybridize) the scaffold sequence.

[0096] In some embodiments, the gRNA sequence is at least 50%, 55%, 60%, 65%, 70%, 75%, 80%. 85%, 90%, 95%. 96%, 97%, 98%. 99%, or at least 100% complementary to a target nucleic acid. In some embodiments, the gRNA sequence is at least 50%, 55%, 60%, 65%, 70%, 75%, 80%, 85%, 90%, 95%, 96%, 97%, 98%, 99%, or at least 100% complementary to the 3′ end of the target nucleic acid (e.g., the last 5, 6, 7, 8, 9, or 10 nucleotides of the 3′ end of the target nucleic acid).

[0097] The gRNA may be a non-naturally occurring gRNA.

[0098] The target sequence may or may not be flanked by a protospacer adjacent motif (PAM) sequence. In some embodiments, the target nucleic acid is flanked by a protospacer adjacent motif (PAM). A PAM site is a nucleotide sequence in proximity to a target sequence. For example, PAM may be a DNA sequence immediately following the DNA sequence targeted by the CRISPR-Cas system. Pam sequences are well-known in the art. Non-limiting examples of the PAM sequences include: CC, CA, AG, GT, TA, AC, CA, GC, CG, GG, CT, TG, GA, AGG, TGG, T-rich PAMs (such as TTT, TTG, TTC, etc.), NGG, NGA, NAG, and NGGNG, where “N” is any nucleotide.

[0099] In certain embodiments, a nucleic acid-guided nuclease can only cleave a target sequence if an appropriate PAM is present. See, for example Doudna et al., Science, 2014, 346(6213): 1258096, incorporated herein by reference. A PAM can be 5′ or 3′ of a target sequence. A PAM can be upstream or downstream of a target sequence. In one embodiment, the target sequence is immediately flanked on the 3′ end by a PAM sequence. A PAM can be 1, 2, 3, 4, 5, 6, 7, 8, 9, 10 or more nucleotides in length. In certain embodiments, a PAM is between 2-6 nucleotides in length. The target sequence may or may not be located adjacent to a PAM sequence (e.g., PAM sequence located immediately 3′ of the target sequence). In some embodiments, e.g., Type I systems, the PAM is on the alternate side of the protospacer (the 5′ end). Makarova et al. describes the nomenclature for all the classes, types, and subtypes of CRISPR systems (Nature Reviews Microbiology 13:722-736 (2015)). Guide structures and PAMs are described in by R. Barrangou (Genome Biol. 16:247 (2015)).

[0100] “Complementarity” refers to the ability of a nucleic acid to form hydrogen bond(s) with another nucleic acid sequence by either traditional Watson-Crick or other non-traditional types. A percent complementarity indicates the percentage of residues in a nucleic acid molecule, which can form hydrogen bonds (e.g., Watson-Crick base pairing) with a second nucleic acid sequence. Full complementarity is not necessarily required, provided there is sufficient complementarity to cause hybridization. There may be mismatches distal from the PAM.

[0101] e. Transposon System

[0102] An engineered transposon system of the present invention may comprise one or more transposases or other components of a transposon. The engineered transposon system facilitates cleavage of the target nucleic acid and subsequent insertion of the donor nucleic acid into the target nucleic acid. The engineered transposon system of the present invention may be derived from any of the known transposon systems and/or transposon components. The transposon systems and components may have different efficiency, different specificity, different transposon end sequences, and the like, but retain the capability to facilitate cleavage of the target nucleic acid and subsequent insertion of the donor nucleic acid into the target nucleic acid.

[0103] In some embodiments, the transposon is a Tn7 or Tn7-like transposon. The Tn7 transposon contains characteristic left and right end sequences and encodes five tns genes, mnsA E, which collectively encode a heteromeric transposase. TnsA is a catalytic enzyme that excises the transposon donor via coordinated double-strand breaks with TnsB. Catalytically impaired TnsA mutants still facilitated genetic modification and may be suitable for the systems and methods disclosed herein. Tn7 and Tn7-like transposons may be categorized based on the presence of the hallmark DDE-like transposase gene, tnsB (also referred to as tniA), the presence of a gene encoding a protein within the AAA+ ATPase family, tnsC (also referred to as tniB), one or more targeting factors that define integration sites (which may include a protein within the tniQ family, also referred to as tnsD, but sometimes includes other distinct targeting factors), and inverted repeat transposon ends that typically comprise multiple binding sites thought to be specifically recognized by the TnsB transposase protein. In Tn7, the targeting factors, or “target selectors,” comprise the genes tnsD and tnsE. Based on biochemical and genetics studies, it is known that TnsD binds a conserved attachment site in the 3′ end of the glmS gene, directing downstream integration, whereas TnsE binds the lagging strand replication fork and directs sequence-non-specific integration primarily into replicating/mobile plasmids. Thus, Tn7 exhibits mobilization patterns that allow for both horizontal and vertical spread (FIG. 1A). In some embodiments, the transposon system comprises TnsA, TnsB, TnsC, or a combination thereof.

[0104] The most well-studied member of this family of transposons is Tn7, hence why the broader family of transposons may be referred to as Tn7-like. “Tn7-like” term does not imply any particular evolutionary relationship between Tn7 and related transposons: in some cases, a Tn7-like transposon will be even more basal in the phylogenetic tree and thus Tn7 can be considered as having evolved from, or derived from, this related Tn7-like transposon.

[0105] Whereas Tn7 comprises tnsD and tnsE target selectors, related transposons comprise other genes for targeting: for example, Tn5090/Tn5053 encode a member of the tniQ family (a homolog of E. coli tnsD) as well as a resolvase gene tniR (see below): Tn6230 encodes the protein TnsF; and Tn6022 encodes two uncharacterized open reading frames orf2 and orf3; Tn6677 and related transposons encode variant Type I-F and Type I-B CRISPR-Cas systems that work together with TniQ for RNA-guided mobilization; and other transposons encode Type V-U5 CRISPR-Cas systems that work together with TniQ for random and RNA-guided mobilization. Any of the above transposon systems are compatible with the systems and methods described herein. In some embodiments, the transposons system comprises TniQ.

[0106] The present system might comprise the transposon Tn6677 in combination with a variant Type I-F CRISPR-Cas (See, Klompe et al., Nature 571, 219-225 (2019) and International Patent Application No. PCT/US20/21568, each incorporated herein by reference in their entirety). The transposon-associated genes comprise tnsA-tnsB-tnsC as well as the tniQ gene that is in the same operon as cas8-cas7-cas6. The transposon Tn6677 may be derived from a Vibrio cholerae or other applicable species, for example those disclosed in International Patent Application No. PCT/US20/21568, incorporated herein by reference in its entirety.

[0107] A type V-K CRISPR-Cas system was shown to direct RNA-guided transposition, though a considerable degree of random integration still occurred in this system. The CRISPR-Cas machinery comprises the Cas12k protein and a dual-guide RNA (which could be fused into a single chimeric guide RNA, or sgRNA); the transposon-associated genes comprise tnsB-tnsC-tniQ. The transposon may be derived from a Scytonema hofmanni isolate. The present system might comprise the transposon comprising tnsB-tnsC-tniQ, e.g., as derived from Scytonema hofmanni, or other homologous transposons, in combination with a variant Type V-K CRISPR-Cas system.

[0108] f. Vectors

[0109] The engineered CRISPR-Cas system and the engineered transposon system may be on the same or different vector(s). The recombinase, or catalytic domain thereof, may be on the same or different vector(s) from either the CRISPR-Cas system and/or the transposon system. For example, the system described herein can be employed through expression of the recombinase in trans. The present system can be delivered to a subject or cell using one or more vectors (e.g., 1, 2, 3, 4, 5, 6, 7, 8, 9, or more vectors). One or more gRNAs (e.g., sgRNAs) can be in a single (one) vector or two or more vectors. The vector may also include the donor nucleic acid. One or more Cas proteins and/or transposon proteins and/or recombinase and/or gRNAs and/or donor nucleic acid can be in the same, or separate vectors. The present disclosure further provides engineered, non-naturally occurring vectors and vector systems, which can encode one or more components of the present system.

[0110] Vectors can be administered directly to patients (in vivo) or they can be used to manipulate cells in vitro or ex vivo, where the modified cells may be administered to patients. The vectors of the present disclosure may be delivered to a eukaryotic cell in a subject. Modification of the eukaryotic cells via the present system can take place in a cell culture, where the method comprises isolating the eukaryotic cell from a subject prior to the modification. In some embodiments, the method further comprises returning said eukaryotic cell and/or cells derived therefrom to the subject.

[0111] Conventional viral and non-viral based gene transfer methods can be used to introduce nucleic acids encoding components of the present system into cells, tissues, or a subject. Such methods can be used to administer nucleic acids encoding components of the present system to cells in culture, or in a host organism. Non-viral vector delivery systems include DNA plasmids, cosmids, RNA (e.g., a transcript of a vector described herein), a nucleic acid, and a nucleic acid complexed with a delivery vehicle. Viral vector delivery systems include DNA and RNA viruses, which have either episomal or integrated genomes after delivery to the cell. Viral vectors include, for example, retroviral, lentiviral, adenoviral, adeno-associated and herpes simplex viral vectors.

[0112] In certain embodiments, the requisite protein and nucleic acid components may be expressed on the same plasmid as the donor nucleic acid, so that the entire system is fully autonomous. The protein and nucleic acid components guiding the targeting and deletion may be encoded within the donor nucleic acid (e.g., the cargo nucleic acid), such that it can guide further mobilization autonomously, whether in the originally transformed microbe, or in other microbes (e.g., in a conjugative plasmid context, in a microbiome context, etc.).

[0113] In certain embodiments, the requisite protein and nucleic acid (e.g., gRNAs, donor nucleic acid) components may be expressed on two or more plasmids.

[0114] Promoters that may be used include T7 RNA polymerase promoters, constitutive E. coli promoters, and promoters that could be broadly recognized by transcriptional machinery in a wide range of bacterial organisms. The system may be used with various bacterial hosts.

[0115] In certain embodiments, plasmids that are non-replicative, or plasmids that can be cured by high temperature may be used. The donor nucleic acid, and donor nucleic acid/CRISPR-associated components, may be removed from the engineered cells under certain conditions. This may allow for nucleic acid deletions by transforming bacteria of interest, but then being left with engineered strains that have no memory of the plasmids used to facilitate the modification.

[0116] Drug selection strategies may be adopted for positively selecting for cells that underwent targeted nucleic acid deletion. The donor nucleic acid may contain one or more drug-selectable markers within a cargo. Then presuming that the original donor nucleic acid plasmid or vector having the other components of the system is removed, drug selection may be used to enrich for integrated clones. Colony screenings may be used to isolate clonal events.

[0117] A variety of viral constructs may be used to deliver the present system (such as one or more Cas proteins and/or Tns proteins, gRNA(s), donor DNA, etc.) to the targeted cells and/or a subject. Nonlimiting examples of such recombinant viruses include recombinant adeno-associated virus (AAV), recombinant adenoviruses, recombinant lentiviruses, recombinant retroviruses, recombinant herpes simplex viruses, recombinant poxviruses, phages, etc. The present disclosure provides vectors capable of integration in the host genome, such as retrovirus or lentivirus. See, e.g., Ausubel et al., Current Protocols in Molecular Biology, John Wiley & Sons, New York, 1989; Kay, M. A., et al., 2001 Nat. Medic. 7(1):33-40; and Walther W. and Stein U., 2000 Drugs, 60(2): 249-71, incorporated herein by reference.

[0118] The present disclosure also provides for DNA segments encoding the proteins disclosed herein, vectors containing these segments and host cells containing the vectors. The vectors may be used to propagate the segment in an appropriate host cell and/or to allow expression from the segment (e.g., an expression vector). The person of ordinary skill in the art would be aware of the various vectors available for propagation and expression of a cloned DNA sequence. In one embodiment, a DNA segment encoding the present protein(s) is contained in a plasmid vector that allows expression of the protein(s) and subsequent isolation and purification of the protein produced by the recombinant vector. Accordingly, the proteins disclosed herein can be purified following expression from the native transposon, obtained by chemical synthesis, or obtained by recombinant methods.

[0119] To construct cells that express the present system, expression vectors for stable or transient expression of the present system may be constructed via conventional methods as described herein and introduced into host cells. For example, nucleic acids encoding the components of the present system may be cloned into a suitable expression vector, such as a plasmid or a viral vector in operable linkage to a suitable promoter. The selection of expression vectors/plasmids/viral vectors should be suitable for integration and replication in eukaryotic cells.

[0120] In certain embodiments, vectors of the present disclosure can drive the expression of one or more sequences in mammalian cells using a mammalian expression vector. Examples of mammalian expression vectors include pCDM8 (Seed, Nature (1987) 329:840, incorporated herein by reference) and pMT2PC (Kaufman, et al., EMBO J. (1987) 6:187, incorporated herein by reference). When used in mammalian cells, the expression vector's control functions are typically provided by one or more regulatory elements. For example, commonly used promoters are derived from polyoma, adenovirus, cytomegalovirus, simian virus, and others disclosed herein and known in the art. For other suitable expression systems for both prokaryotic and eukaryotic cells see, e.g., Chapters 16 and 17 of Sambrook, et al., MOLECULAR CLONING: A LABORATORY MANUAL. 2nd eds., Cold Spring Harbor Laboratory, Cold Spring Harbor Laboratory Press, Cold Spring Harbor, N.Y., 1989, incorporated herein by reference.

[0121] Vectors of the present disclosure can comprise any of a number of promoters known to the art, wherein the promoter is constitutive, regulatable or inducible, cell type specific, tissue-specific, or species specific. In addition to the sequence sufficient to direct transcription, a promoter sequence of the invention can also include sequences of other regulatory elements that are involved in modulating transcription (e.g., enhancers, Kozak sequences and introns). Many promoter/regulatory sequences useful for driving constitutive expression of a gene are available in the art and include, but are not limited to, for example, CMV (cytomegalovirus promoter), EF1a (human elongation factor 1 alpha promoter), SV40 (simian vacuolating virus 40 promoter), PGK (mammalian phosphoglycerate kinase promoter), Ubc (human ubiquitin C promoter), human beta-actin promoter, rodent beta-actin promoter, CBh (chicken beta-actin promoter), CAG (hybrid promoter contains CMV enhancer, chicken beta actin promoter, and rabbit beta-globin splice acceptor), TRE (Tetracycline response element promoter), H1 (human polymerase III RNA promoter), U6 (human U6 small nuclear promoter), and the like. Additional promoters that can be used for expression of the components of the present system, include, without limitation, cytomegalovirus (CMV) intermediate early promoter, a viral LTR such as the Rous sarcoma virus LTR, HIV-LTR, HTLV-1 LTR, Maloney murine leukemia virus (MMLV) LTR, myeoloproliferative sarcoma virus (MPSV) LTR, spleen focus-forming virus (SFFV) LTR, the simian virus 40 (SV40) early promoter, herpes simplex tk virus promoter, elongation factor 1-alpha (EF1-α) promoter with or without the EF1-α intron. Additional promoters include any constitutively active promoter. Alternatively, any regulatable promoter may be used, such that its expression can be modulated within a cell.

[0122] Moreover, inducible and tissue specific expression of a RNA, transmembrane proteins, or other proteins can be accomplished by placing the nucleic acid encoding such a molecule under the control of an inducible or tissue specific promoter/regulatory sequence. Examples of tissue specific or inducible promoter/regulatory sequences which are useful for this purpose include, but are not limited to, the rhodopsin promoter, the MMTV LTR inducible promoter, the SV40 late enhancer/promoter, synapsin 1 promoter, ET hepatocyte promoter, GS glutamine synthase promoter and many others. Various commercially available ubiquitous as well as tissue-specific promoters and tumor-specific are available, for example from InvivoGen. In addition, promoters which are well known in the art can be induced in response to inducing agents such as metals, glucocorticoids, tetracycline, hormones, and the like, are also contemplated for use with the invention. Thus, it will be appreciated that the present disclosure includes the use of any promoter/regulatory sequence known in the art that is capable of driving expression of the desired protein operably linked thereto.

[0123] The vectors of the present disclosure may direct expression of the nucleic acid in a particular cell type (e.g., tissue-specific regulatory elements are used to express the nucleic acid). Such regulatory elements include promoters that may be tissue specific or cell specific. The term “tissue specific” as it applies to a promoter refers to a promoter that is capable of directing selective expression of a nucleotide sequence of interest to a specific type of tissue (e.g., seeds) in the relative absence of expression of the same nucleotide sequence of interest in a different type of tissue. The term “cell type specific” as applied to a promoter refers to a promoter that is capable of directing selective expression of a nucleotide sequence of interest in a specific type of cell in the relative absence of expression of the same nucleotide sequence of interest in a different type of cell within the same tissue. The term “cell type specific” when applied to a promoter also means a promoter capable of promoting selective expression of a nucleotide sequence of interest in a region within a single tissue. Cell type specificity of a promoter may be assessed using methods well known in the art, e.g., immunohistochemical staining.

[0124] Additionally, the vector may contain, for example, some or all of the following: a selectable marker gene, such as the neomycin gene for selection of stable or transient transfectants in host cells; enhancer/promoter sequences from the immediate early gene of human CMV for high levels of transcription; transcription termination and RNA processing signals from SV40 for mRNA stability: 5′- and 3′-untranslated regions for mRNA stability and translation efficiency from highly-expressed genes like α-globin or β-globin; SV40 polyoma origins of replication and ColE1 for proper episomal replication; internal ribosome binding sites (IRESes), versatile multiple cloning sites; T7 and SP6 RNA promoters for in vitro transcription of sense and antisense RNA: a “suicide switch” or “suicide gene” which when triggered causes cells carrying the vector to die (e.g., HSV thymidine kinase, an inducible caspase such as iCasp9), and reporter gene for assessing expression of the chimeric receptor. Suitable vectors and methods for producing vectors containing transgenes are well known and available in the art. Selectable markers also include chloramphenicol resistance, tetracycline resistance, spectinomycin resistance, streptomycin resistance, erythromycin resistance, rifampicin resistance, bleomycin resistance, thermally adapted kanamycin resistance, gentamycin resistance, hygromycin resistance, trimethoprim resistance, dihydrofolate reductase (DHFR), GPT: the URA3, HIS4, LEU2, and TRP1 genes of S. cerevisiae.

[0125] When introduced into the host cell, the vectors may be maintained as an autonomously replicating sequence or extrachromosomal element or may be integrated into host DNA.

[0126] In one embodiment, the donor nucleic acid may be delivered using the same gene transfer system as used to deliver the Cas protein, the recombinase, and/or transposon system proteins (included on the same vector) or may be delivered using a different delivery system. In another embodiment, the donor nucleic acid may be delivered using the same transfer system as used to deliver gRNA(s).

[0127] In one embodiment, the present disclosure comprises integration of an exogenous nucleic acid into the endogenous gene. Alternatively, an exogenous nucleic acid is not integrated into the endogenous gene. The donor nucleic acid may be packaged into an extrachromosomal, or episomal vector (such as AAV vector), which persists in the nucleus in an extrachromosomal state, and offers donor-template delivery and expression without integration into the host genome. Use of extrachromosomal gene vector technologies has been discussed in detail by Wade-Martins R (Methods Mol Biol. 2011; 738:1-17, incorporated herein by reference).

[0128] The present system (e.g., proteins, polynucleotides encoding these proteins, nucleic acids and compositions comprising the proteins and/or polynucleotides described herein) may be delivered by any suitable means. In certain embodiments, the system is delivered in vivo. In other embodiments, the system is delivered to isolated/cultured cells (e.g., autologous iPS cells) in vitro to provide modified cells useful for in vivo delivery to patients afflicted with a disease or condition.

[0129] Vectors according to the present disclosure can be transformed, transfected, or otherwise introduced into a wide variety of host cells. Transfection refers to the taking up of a vector by a host cell whether or not any coding sequences are in fact expressed. Numerous methods of transfection are known to the ordinarily skilled artisan, for example, lipofectamine, calcium phosphate co-precipitation, electroporation, DEAE-dextran treatment, microinjection, viral infection, and other methods known in the art. Transduction refers to entry of a virus into the cell and expression (e.g., transcription and/or translation) of sequences delivered by the viral vector genome. In the case of a recombinant vector, “transduction” generally refers to entry of the recombinant viral vector into the cell and expression of a nucleic acid of interest delivered by the vector genome.

[0130] Any of the vectors comprising a nucleic acid sequence that encodes the components of the present system is also within the scope of the present disclosure. Such a vector may be delivered into cells by a suitable method. Methods of delivering vectors to cells are well known in the art and may include DNA or RNA electroporation, transfection reagents such as liposomes or nanoparticles to delivery DNA or RNA; delivery of DNA, RNA, or protein by mechanical deformation (see. e.g., Sharei et al. Proc. Natl. Acad. Sci. USA (2013) 110(6): 2082-2087, incorporated herein by reference); or viral transduction. In some embodiments, the vectors are delivered to cells by viral transduction. Nucleic acids can be delivered as part of a larger construct, such as a plasmid or viral vector, or directly, e.g., by electroporation, lipid vesicles, viral transporters, microinjection, and biolistics (high-speed particle bombardment). Similarly, the construct containing the one or more transgenes can be delivered by any method appropriate for introducing nucleic acids into a cell. In some embodiments, the construct or the nucleic acid encoding the components of the present system is a DNA molecule. In some embodiments, the nucleic acid encoding the components of the present system is a DNA vector and may be electroporated to cells. In some embodiments, the nucleic acid encoding the components of the present system is an RNA molecule, which may be electroporated to cells.

[0131] Additionally, delivery vehicles such as nanoparticle- and lipid-based mRNA or protein delivery systems can be used. Further examples of delivery vehicles include lentiviral vectors, ribonucleoprotein (RNP) complexes, lipid-based delivery system, gene gun, hydrodynamic, electroporation or nucleofection microinjection, and biolistics. Various gene delivery methods are discussed in detail by Nayerossadat et al. (Adv Biomed Res. 2012; 1: 27) and Ibraheem et al. (Int J Pharm. 2014 Jan. 1; 459(1-2):70-83), incorporated herein by reference.

[0132] Exemplary vectors encoding the systems described herein are provided in SEQ ID NO: 15-38 and additional vectors appropriate for the methods and uses described herein may be found in International Application No. PCT/US20/21568.

### 3. METHODS

[0133] Also disclosed herein are methods for deleting a nucleic acid sequence from a target nucleic acid and methods of inactivating a gene of interest using the disclosed systems or kits. Further disclosed are methods for genetically modifying diverse bacterial communities (e.g., gut or fecal-derived bacteria).

[0134] Methods for deleting a nucleic acid sequence of interest from a target nucleic acid comprise contacting the target nucleic acid with the system described herein. The methods can be used to delete any nucleic acid sequence of interest from a target nucleic acid. The methods may be used in vitro, ex vivo, or in vivo.

[0135] In some embodiments, the nucleic acid sequence of interest acid is chromosomal DNA or genomic DNA. In some embodiments, the nucleic acid sequence of interest is bacterial plasmid DNA. The nucleic acid sequence of interest can comprise portion of or an entire gene (e.g., the promoter region, the coding region, the termination region, or any combination thereof). In some embodiments, the nucleic acid sequence of interest comprises non-coding DNA. The nucleic acid sequence of interest can comprise regions which are responsible for producing RNA.

[0136] The nucleic acid sequence of interest can be of any size. For example, the nucleic acid sequence of interest may be 10 bases or 100 kilobases. In some embodiments, the nucleic acid sequence of interest comprises at least 50 bases, at least 100 bases, at least 1 kilobase, at least 5 kilobases, at least, 10 kilobases, at least 15 kilobases, or at least 20 kilobases.

[0137] The descriptions and embodiments provided above for the engineered CRISPR-Cas system, the engineered transposon system, the recombinase, or catalytic domain thereof, and the donor nucleic acid are applicable to the methods described herein.

[0138] In some embodiments, the methods may comprise introducing the disclosed systems into a cell. In some embodiments, the recombinase, or catalytic domain thereof, and/or one or more vectors encoding a recombinase, or catalytic domain thereof is introduced to the cell after the introduction of the engineered CRISPR-Cas system, the engineered transposon system, and the at least one donor nucleic acid. For example, all four components may be introduced simultaneous or nearly simultaneously. In some embodiments, all four components may be introduced, in any order, with a time period separating each introduction. In alternative embodiments, the introduction of the recombinase to the cell is after the introduction the CRISPR-Cas system, the transposon system, and the donor nucleic acid, such that RNA-guided nucleic acid integration has already occurred.

[0139] Methods for inactivating a gene of interest comprise introducing into one or more cells the systems described herein, wherein the nucleic acid sequence for deletion comprises at least a portion of the gene of interest. The one or more cells may be eukaryotic cells or prokaryotic cells.

[0140] The gene of interest may comprise any gene of interest to inactivate or delete. In some embodiments, the gene of interest comprises an antibiotic resistance gene, a virulence gene, a metabolic gene, a toxin gene, a remodeling gene, a gene or gene variant responsible for a disease, or a mutant gene.

[0141] In some embodiments, the gene of interest is located chromosomally. In some embodiments, the gene of interest is located episomally, e.g., in bacterial cells.

[0142] The cell can be a mitotic and/or post-mitotic cell from any eukaryotic cell or organism (e.g. a cell of a single-cell eukaryotic organism, a plant cell, an algal cell, a fungal cell (e.g., a yeast cell), an animal cell, a cell from an invertebrate animal (e.g. fruit fly, cnidarian, echinoderm, nematode, an insect, an arachnid, etc.), a cell from a vertebrate animal (e.g., fish, amphibian, reptile, bird, mammal), a cell from a mammal, a cell from a rodent, a cell from a human, etc.), or a protozoan cell. Any type of cell may be of interest (e.g. a stem cell, e.g. an embryonic stem (ES) cell, an induced pluripotent stem (iPS) cell, a germ cell; a somatic cell, e.g. a fibroblast, a hematopoietic cell, a neuron, a muscle cell, a bone cell, a hepatocyte, a pancreatic cell, a liver cell, a lung cell, a skin cell: an in vitro or in vivo embryonic cell of an embryo at any stage, e.g., a 1-cell, 2-cell, 4-cell, 8-cell, etc. stage zebrafish embryo; etc.). Cells may be from established cell lines or they may be primary cells, where “primary cells”, “primary cell lines”, and “primary cultures” are used interchangeably herein to refer to cells and cells cultures that have been derived from a subject and allowed to grow in vitro for a limited number of passages.

[0143] In some embodiments, the one or more cells comprise plant cells. Suitable plant cells may be from a number of different plants including, but are not limited to, monocotyledonous and dicotyledonous plants, such as crops including grain crops (e.g., wheat, maize, rice, millet, barley), fruit crops (e.g., tomato, apple, pear, strawberry, orange), forage crops (e.g., alfalfa), root vegetable crops (e.g., carrot, potato, sugar beets, yam), leafy vegetable crops (e.g., lettuce, spinach); flowering plants (e.g., petunia, rose, chrysanthemum), conifers and pine trees (e.g., pine fir, spruce): plants used in phytoremediation (e.g., heavy metal accumulating plants); oil crops (e.g., sunflower, rapeseed) and plants used for experimental purposes (e.g., Arabidopsis). Thus, the disclosed methods and compositions have use over a broad range of plants, including, but not limited to, species from the genera Asparagus, Avena, Brassica, Citrus, Citrullus, Capsicum, Cucurbita, Daucus, Glycine, Hordeum, Lactuca, Lycopersicon, Malus, Manihot, Nicotiana, Oryza, Persea, Pisum, Pyrus, Prunus, Raphanus, Secale, Solanum, Sorghum, Triticum, Vitis, Vigna, and Zea.

[0144] In some embodiments, the one or more cells are animal cells. The present disclosure provides for a modified animal cell produced by the present system and method, an animal comprising the animal cell, a population of cells comprising the cell, tissues, and at least one organ of the animal. The present disclosure further encompasses the progeny, clones, cell lines or cells of the genetically modified animal. The present cells may be used for transplantation (e.g., hematopoietic stem cells or bone marrow).

[0145] Non-limiting examples of animal cells that may be genetically modified using the systems and methods include, but are not limited to, cells from: mammals such as primates (e.g., ape, chimpanzee, macaque), rodents (e.g., mouse, rabbit, rat), canine or dog, livestock (cow/bovine, donkey, sheep/ovine, goat or pig), fowl or poultry (e.g., chicken), and fish (e.g., zebra fish). The present methods and systems may be used for cells from other eukaryotic model organisms, e.g., Drosophila, C. elegans, etc. In certain embodiments, the mammal is a human, a non-human primate (e.g., marmoset, rhesus monkey, chimpanzee), a rodent (e.g., mouse, rat, gerbil, Guinea pig, hamster, cotton rat, naked mole rat), a rabbit, a livestock animal (e.g., goat, sheep, pig, cow, cattle, buffalo, horse, camelid), a pet mammal (e.g., dog, cat), a zoo mammal, a marsupial, an endangered mammal, and an outbred or a random bred population thereof.

[0146] In some embodiments, the one or more cells comprise microbial cells. In some embodiments, the microbial cells are Gram-negative bacterial cells, Gram-positive bacterial cells, or a combination thereof. In some embodiments, the microbial cells are pathogenic bacterial cells. In some embodiments, the microbial cells are non-pathogenic bacterial cells (e.g., probiotic and/or commensal bacterial cells). In some embodiments, the microbial cells form microbial flora (e.g., natural human microbial flora). In some embodiments, the microbial cells are used in industrial or environmental bioprocesses (e.g., bioremediation).

[0147] The cell can be a cancer cell. The cell can be a stem cell. Examples of stem cells include pluripotent, multipotent and unipotent stem cells. Examples of pluripotent stem cells include embryonic stem cells, embryonic germ cells, embryonic carcinoma cells and induced pluripotent stem cells (iPSCs). The cell may be an induced pluripotent stem cell (iPSC), e.g., derived from a fibroblast of a subject. In another embodiment, the cell can be a fibroblast.

[0148] Cell replacement therapy can be used to prevent, correct, or treat a disease or condition, where the methods of the present disclosure are applied to isolated patient's cells (er vivo), which is then followed by the administration of the genetically modified cells into the patient.

[0149] The cell may be autologous or allogeneic to the subject who is administered the cell. As described herein, the genetically modified cells may be autologous to the subject, e.g., the cells are obtained from the subject in need of the treatment, genetically engineered, and then administered to the same subject. Alternatively, the host cells are allogeneic cells, e.g., the cells are obtained from a first subject, genetically engineered, and administered to a second subject that is different from the first subject but of the same species. In some embodiments, the genetically modified cells are allogeneic cells and have been further genetically engineered to reduced graft-versus-host disease.

[0150] “Induced pluripotent stem cells.” commonly abbreviated as iPS cells or iPSCs, refer to a type of pluripotent stem cell artificially prepared from a non-pluripotent cell, typically an adult somatic cell, or terminally differentiated cell, such as a fibroblast, a hematopoietic cell, a myocyte, a neuron, an epidermal cell, or the like, by introducing certain factors, referred to as reprogramming factors.

[0151] The term “autologous” refers to any material derived from the same individual to whom it is later to be re-introduced into the same individual.

[0152] The term “allogeneic” refers to any material derived from a different animal of the same species as the individual to whom the material is introduced. Two or more individuals of the same species are said to be allogeneic to one another.

[0153] The systems and methods may be used to modify a stem cell. The term “stem cell” is used herein to refer to a cell that has the ability both to self-renew and to generate a differentiated cell type (see Morrison et al. (1997) Cell 88:287-298, incorporated herein by reference). Stem cells may be characterized by both the presence of specific markers (e.g., proteins, RNAs, etc.) and the absence of specific markers. Stem cells may also be identified by functional assays both in vitro and in vitro, particularly assays relating to the ability of stem cells to give rise to multiple differentiated progeny. Stem cells of interest include pluripotent stem cells (PSCs). The term “pluripotent stem cell” or “PSC” is used herein to mean a stem cell capable of producing all cell types of the organism.

[0154] The present disclosure further provides progeny of a genetically modified cell, where the progeny can comprise the same genetic modification as the genetically modified cell from which it was derived. The present disclosure further provides a composition comprising a genetically modified cell. In some embodiments, a genetically modified host cell can generate a genetically modified organism. For example, the genetically modified host cell is a pluripotent stem cell, it can generate a genetically modified organism. Methods of producing genetically modified organisms are known in the art.

[0155] Also disclosed herein are methods for genetically modifying diverse bacterial communities (e.g., gut or fecal-derived bacteria). The methods comprise contacting a recipient bacterial community with donor bacteria, the donor bacteria comprising a vector encoding: an engineered Clustered Regularly Interspaced Short Palindromic Repeats (CRISPR)-CRISPR associated (Cas) (CRISPR-Cas) system, wherein the engineered CRISPR-Cas system comprises: (a) at least one Cas protein, and (b) at least one guide RNA (gRNA); an engineered transposon system: and at least one donor nucleic acid to be integrated, wherein the donor nucleic acid is flanked by at least one transposon end sequence and optionally further comprises a cargo nucleic acid. In some embodiments, the vector is conjugative plasmid.

[0156] In some embodiments, the vector further encodes a recombinase, or a catalytic domain thereof, and the at least one donor nucleic acid further comprises a recognition site for the recombinase. In some embodiments, the cargo nucleic acid comprises the recognition site for the recombinase.

[0157] In some embodiments, the engineered CRISPR-Cas system comprises a pair of guide RNAs (gRNAs), wherein the pair of gRNAs is configured to hybridize to target sites flanking a nucleic acid sequence for deletion. In some embodiments, the nucleic acid sequence for deletion comprises a genomic nucleic acid sequence endogenous to the recipient bacterial community.

[0158] The descriptions and embodiments provided above for the components of the CRISPR-Cas system, the transposon system, the recombinase, or catalytic domain thereof, and the donor nucleic acid are applicable to the methods for genetically modifying diverse bacterial communities.

[0159] The system and methods may be used in various bacterial hosts, including human pathogens that are medically important, bacterial pests that are key targets within the agricultural industry, human bacteria important for gut or over health, as well as antibiotic resistant versions thereof; e.g., pathogenic Pseudomonas strains, Staphylococcus aureus, Pneumoniae species, Helicobacter pylori, Enterobacteriaceae, Campylobacter spp., Neisseria gonorrhoeae, Enterococcus faecium, Acinetobacter baumannii, E. coli, Klebsiella pneumoniae, etc.

[0160] In some embodiments, the microbial cells are Gram-negative bacterial cells, Gram-positive bacterial cells, or a combination thereof.

[0161] In some embodiments, the microbial cells are pathogenic bacterial cells. For example, the pathogenic microbial cells may be extended-spectrum beta-lactamase-producing (ESBL) Escherichia coli, Pseudomonas aeruginosa, vancomycin-resistant Enterococcus (VRE), methicillin-resistant Staphylococcus aureus (MRSA), multidrug-resistant (MDR) Acinetobacter baumannii, MDR Enterobacter spp. bacterial cells or a combination thereof.

[0162] In some embodiments, the microbial cells are non-pathogenic bacterial cells (e.g., probiotic and/or commensal bacterial cells). In some embodiments, the microbial cells form microbial flora (e.g., natural human microbial flora). Thus, the microbial cells that are members of the phyla Actinobacteria, Bacteroidetes, Proteobacteria, Firmicutes, or others, or a combination thereof, as suitable for use with the disclosed systems and methods.

[0163] In some embodiments, the microbial cells are used in industrial or environmental bioprocesses (e.g., bioremediation).

[0164] The methods for deleting a nucleic acid sequence, for inactivating a gene of interest, and genetically modifying diverse bacterial communities may be used to inactivate microbial genes. In some embodiments, the gene is an antibiotic resistance gene. For example, the coding sequence of bacterial resistance genes may be disrupted in vivo by insertion of a DNA sequence or deletion of a portion of the bacterial resistance genes, leading to non-selective re-sensitization to drug treatment. In one embodiment, in addition to disruption of resistance genes, when the systems are incorporated on the inserted cargo the present system acts as a replicative transposon and the system can further propagate itself along with the target plasmid.

[0165] The present methods may also be used to treat a multi-drug resistance bacterial infection in a subject. Beyond resistance genes, the method may be designed to target any gene or any set of genes, such as virulence or metabolic genes, for clinical and industrial applications in other embodiments. The present methods may be used to target and eliminate virulence genes from the population, to perform in situ gene knockouts, or to stably introduce new genetic elements to the metagenomic pool of a microbiome. For example, the methods may be used to introduce new proteins or enzyme to aid in the digestions of dietary compounds.

[0166] The methods may comprise administering to the subject, in vivo, or by transplantation of er vivo treated cells, a therapeutically effective amount of the described system. The components of the described systems, methods, or ex vivo treated cells (e.g., donor bacteria) may be administered with a pharmaceutically acceptable carrier or excipient as a pharmaceutical composition. In some embodiments, the components of the systems and methods may be mixed, individually or in any combination, with a pharmaceutically acceptable carrier to form pharmaceutical compositions, which are also within the scope of the present disclosure.

[0167] Administration may be through any suitable mode of administration, including but not limited to: intravenous, intra-arterial, intramuscular, intracardiac, intrathecal, subventricular, epidural, intracerebral, intracerebroventricular, sub-retinal, intravitreal, intraarticular, intraocular, intraperitoneal, intrauterine, intradermal, subcutaneous, transdermal, transmucosal, topical, and inhalation. In some embodiments, the vector(s) is delivered to the tissue of interest by, for example, an intramuscular, intravenous, transdermal, intranasal, oral, mucosal, or other delivery methods. In some embodiments, administering comprises intravenous administration. Such delivery may be either via a single dose, or multiple doses.

[0168] In some embodiments, an effective amount of the components of the systems, methods or compositions as described can be administered. As used herein the term “effective amount” may be used interchangeably with the term “therapeutically effective amount” and refers to that quantity that is sufficient to result in a desired activity upon administration to a subject in need thereof. Within the context of the present disclosure, the term “effective amount” refers to that quantity of the components of the system such that successful nucleic acid deletion is achieved.

[0169] When utilized as a method of treatment, the effective amount may depend on the particular condition being treated, the severity of the condition, the individual patient parameters including age, physical condition, size, gender and weight, the duration of the treatment, the nature of concurrent therapy (if any), the specific route of administration and like factors within the knowledge and expertise of the health practitioner. In some embodiments, the effective amount alleviates, relieves, ameliorates, improves, reduces the symptoms, or delays the progression of any disease or disorder in the subject. In some embodiments, the subject is a human.

[0170] In the context of the present disclosure insofar as it relates to a disease, the terms “treat,” “treatment,” and the like mean to relieve or alleviate at least one symptom associated with such condition, or to slow or reverse the progression of such condition. Within the meaning of the present disclosure, the term “treat” also denotes to arrest, delay the onset (e.g., the period prior to clinical manifestation of a disease) and/or reduce the risk of developing or worsening a disease. For example, in connection with cancer the term “treat” may mean eliminate or reduce a patient's tumor burden, or prevent, delay, or inhibit metastasis, etc.

[0171] The phrase “pharmaceutically acceptable,” as used in connection with compositions and/or cells of the present disclosure, refers to molecular entities and other ingredients of such compositions that are physiologically tolerable and do not typically produce untoward reactions when administered to a subject (e.g., a mammal, a human). Preferably, as used herein, the term “pharmaceutically acceptable” means approved by a regulatory agency of the Federal or a state government or listed in the U.S. Pharmacopeia or other generally recognized pharmacopeia for use in mammals, and more particularly in humans. “Acceptable” means that the carrier is compatible with the active ingredient of the composition (e.g., the nucleic acids, vectors, cells, or therapeutic antibodies) and does not negatively affect the subject to which the composition(s) are administered. Any of the pharmaceutical compositions and/or cells to be used in the present methods can comprise pharmaceutically acceptable carriers, excipients, or stabilizers in the form of lyophilized formations or aqueous solutions.

[0172] Pharmaceutically acceptable carriers, including buffers, are well known in the art, and may comprise phosphate, citrate, and other organic acids; antioxidants including ascorbic acid and methionine; preservatives; low molecular weight polypeptides: proteins, such as serum albumin, gelatin, or immunoglobulins; amino acids: hydrophobic polymers; monosaccharides; disaccharides; and other carbohydrates: metal complexes: and/or non-ionic surfactants. See, e.g., Remington: The Science and Practice of Pharmacy 20th Ed. (2000) Lippincott Williams and Wilkins, Ed. K. E. Hoover.

[0173] Genetic modification may be assessed using techniques that include, for example, Northern blot analysis, in situ hybridization analysis. Western analysis, immunoassays such as enzyme-linked immunosorbent assays, and reverse-transcriptase PCR (RT-PCR). The site of integration or deletion may be determined by Sanger sequencing or next-generation sequencing (NGS).

### 4. KITS

[0174] Also within the scope of the present disclosure are kits that include the components of the present system.

[0175] The kit may include instructions for use in any of the methods described herein. The instructions can comprise a description of administration of the present system or composition to a subject to achieve the intended effect. The instructions generally include information as to dosage, dosing schedule, and route of administration for the intended treatment. The kit may further comprise a description of selecting a subject suitable for treatment based on identifying whether the subject is in need of the treatment.

[0176] The containers may be unit doses, bulk packages (e.g., multi-dose packages) or sub-unit doses. Instructions supplied in the kits of the disclosure are typically written instructions on a label or package insert. The label or package insert indicates that the pharmaceutical compositions are used for treating, delaying the onset, and/or alleviating a disease or disorder in a subject.

[0177] The kits provided herein are in suitable packaging. Suitable packaging includes, but is not limited to, vials, bottles, jars, flexible packaging, and the like. Also contemplated are packages for use in combination with a specific device, such as an inhaler, nasal administration device, or an infusion device. A kit may have a sterile access port (for example, the container may be an intravenous solution bag or a vial having a stopper pierceable by a hypodermic injection needle). The container may also have a sterile access port.

[0178] Kits optionally may provide additional components such as buffers and interpretive information. Normally, the kit comprises a container and a label or package insert(s) on or associated with the container. In some embodiment, the disclosure provides articles of manufacture comprising contents of the kits described above.

[0179] The kit may further comprise a device for holding or administering the present system or composition. The device may include an infusion device, an intravenous solution bag, a hypodermic needle, a vial, and/or a syringe.

[0180] The present disclosure also provides for kits for performing the methods or producing the components in vitro. The kit may include the components of the present system. Optional components of the kit include one or more of the following: (1) buffer constituents, (2) control plasmid, (3) sequencing primers.

### 5. EXAMPLES

[0181] The following are examples of the present invention and are not to be construed as limiting.

### Methods

[0182] Plasmid construction. All V. cholerae INTEGRATE plasmid constructs were generated from pQCascade, pTnsABC, and pDonor using a combination of restriction digestion, ligation. Gibson assembly, and inverted (around-the-horn) PCR. All PCR fragments for cloning were generated using Q5 DNA Polymerase (NEB).

[0183] Different plasmid backbone versions of pSPIN were cloned by generating one PCR fragment of the single INTEGRATE transcript and donor and combining with a digested vector backbone in a Gibson assembly reaction. pSPAIN was generated by Gibson assembly; a 0.98-kb mini-Tn was first inserted into a digested empty pBBR1 backbone, followed by double digestion of the cargo within the mini-Tn and insertion of the single INTEGRATE transcript.

[0184] ShoINT system was synthesized by GenScript; Cas12k and the sgRNA were synthesized as two separate cassettes on a pCDFDuet-1 (pCDF) plasmid, TnsA-TnsB-TniQ was synthesized as a native operon on a pCOLADuet-1 (pCOLA) plasmid, and the mini-Tn was synthesized on a pUC19 plasmid. Sho-pEffector and Sho-pSPIN were generated from these plasmids using Gibson assembly. ShCAST system was synthesized by GenScript according to the constructs described previously 40, with pHelper on pUC19 and pDonor on pCDF backbones. Pairwise protein sequence similarities between the VchINT. ShoINT, and ShCAST machinery can be found in FIG. 19.

[0185] Each construct containing a spacer was first constructed with a filler sequence containing tandem BsaI recognition sites in place of the spacer for VchINT and ShoINT, and tandem BbsI sites for ShCAST. New spacers were then cloned into the arrays by phosphorylation of oligo pairs with T4 PNK (NEB), hybridization of the oligo pair, and ligation into double BsaI- or BbsI-digested plasmid. Double- and triple-spacer arrays were cloned by combining two or three oligoduplexes with compatible sticky ends into the same ligation reaction. crRNAs for VchINT were designed with 32-nt spacers targeting sites with 5′ CC PAM. sgRNAs for ShoINT and ShCAST were designed with 23-nt spacers targeting sites with 5′ RGTN PAM and 5′ NGTT PAM, respectively. Spacer sequences used for this study are SEQ ID NOs: 132-172. The guide RNA design algorithm (FIG. 16) was not used to generate spacers for this study.

[0186] Cloning reactions were transformed into NEB Turbo E. coli, and plasmids were extracted using Qiagen Miniprep columns and confirmed by Sanger sequencing (GENEWIZ). Transformed cells were cultured in liquid LB media or LB agar media, with addition of 100 μg/ml carbenicillin for pUC19 plasmids, 50 μg/ml spectinomycin for pCDF and pSC101*, and 50 μg/ml kanamycin for pCOLA, pSC101 and pBBR1. All plasmid construct sequences are available SEQ ID NOs: 1-113, and a subset are deposited at Addgene.

[0187] E. coli culturing and general transposition assays. A full list of E. coli strains used for transposition experiments is provided in FIG. 20. All E. coli transformations were performed using homemade chemically competent cells and standard heat shock transformation, followed by recovery in LB at 37° C. and plating on LB-agar media with the appropriate antibiotics at the concentrations described above. Typical transformations efficiencies were >103 CFU/μg of total DNA. All standard transposition assays in E. coli involved incubation at 37° C. for 24 hours after recovery and plating. However, experiments involving incubation at 30° C. or 25° C. were performed for an extended total of 30 hours; due to the reduced growth rate at these temperatures, cells were incubated longer to produce enough cell material for downstream analyses. To control for this extended incubation time, all incubations for FIG. 4C were performed uniformly for 30 hours, including the 37° C. incubations. For similar reasons, incubation for the ΔrecA transposition assays (FIG. 9C) was performed for 30 hours due to significantly slower growth rate of the ΔrecA strain.

[0188] For most experiments involving an IPTG-inducible T7 promoter, transformed cells were plated directly on 0.1 mM IPTG LB agar plates for 24 hours after recovery. Exceptions were for the pUC19 pSPIN construct (FIG. 1D), all transposition assays performed for FIG. 1E, and all ShoINT and ShCAST experiments, where transformed cells were first plated on LB agar without induction and incubated for 16 hours, and were then scraped and replated on LB agar with 0.1 mM IPTG and incubated for 24 hours. For these experiments, this replating protocol was generally used since initial transformation efficiencies were low, potentially from significant IPGT induced toxicities affecting transformation; separating transformation and induction steps allowed for enough cells to be generated for lysis and further analyses. To avoid IPTG degradation affecting transposition efficiency, LB agar plates were made fresh with frozen IPTG stocks, and were kept at 4° C. and used within 7 days of preparation. All post-transformation incubations involving active transposition were performed on solid media to avoid competitive growth effects causing enrichment of rare events.

[0189] Experiments involving three plasmids—pDonor, pTnsABC and pQCascade or variants—were performed by first transforming pTnsABC and pDonor into chemical competent cells, picking a single colony and growing overnight in liquid LB media with double antibiotic selection, inducing chemical competency using standard methods, and then transforming these cells with the pQCascade plasmid. Experiments involving two plasmids were performed by co-transformation of both plasmids into chemical competent cells simultaneously, although this generally resulted in lower transformation efficiencies and required more input DNA than if the plasmids had been transformed iteratively.

[0190] Transposition assays in Klebsiella oxytoca and Pseudomonas putida. A full list of bacterial strains used for transposition experiments is provided in FIG. 20.

[0191] For K. oxytoca transformations, cells were grown overnight to saturation, and were diluted 1:100 and grown to OD600 of ˜0.4-0.5. Cells were then placed on ice for 15-30 min and subsequently washed three times with ice-cold 10% glycerol DI water. After the washes, cells were concentrated 100-fold in ice-cold 10% glycerol DI water. 50 μl of cells were electroporated with 50 ng plasmid, using 0.1 cm cuvettes at 1.8 kV. Cells were recovered in 1 ml of LB media for 2 hours at 37° C., and were plated on LB agar with selection at 37° C. for 24 hours.

[0192] For P. putida transformations, a previously described protocol was adapted (Aparicio, T., et al., Microb Biotechnol (2019), incorporated herein by reference in its entirety). Briefly, overnight cultures were washed three times with 300 mM sucrose and concentrated 50-fold. Cells were then distributed into 100 μl aliquots and separately electroporated with 100 ng of plasmid using 0.2 cm cuvette at 2.5 kV, and were recovered in 1 ml of LB media for 2 hours at 30° C. Recovered cells were plated on LB agar with selection at 30° C. for 24 hours.

[0193] All transposition assays for K. oxytoca and P. putida were performed by transforming a pSPIN construct on a pBBR1 backbone, expressed from a constitutive J23119 promoter. Cells were incubated on LB agar for 24 hours after recovery; colonies were then scraped for gDNA extraction using the Wizard Genomic DNA Purification kit (Promega).

[0194] PCR and qPCR analysis of transposition. E. coli cells transformed with INTEGRATE machinery were scraped from LB agar plates and suspended in liquid LB, and the OD600 of the resulting suspensions were taken. From each resuspension, approximately 3.2×10⁸ cells (equivalent to 200 μl of OD600=2.0 of resuspended cells) were taken for lysis. In scenarios where colonies were small and less than this amount of cell resuspension was recovered, the entire resuspension of cells was used for lysis. Cells were pelleted by centrifugation at 4000 g for 2 min, the LB supernatant was poured off and cells were resuspended in 80 μl of DI water, followed by lysis at 95° C. for 10 min. The lysates were cooled to room temperature, pelleted by centrifugation at 4000 g for 2 min, and the supernatant was diluted 20-fold in DI water and used for subsequent analyses. Further dilutions of lysates may be used for analysis, while polymerase inhibition from raw lysates at higher concentrations than the 20-fold dilution, especially for qPCR, have been observed.

[0195] PCR reactions for E. coli samples were performed using Q5 Polymerase (NEB) in a 12.5 μl reaction containing 200 μM dNTPs, 0.5 μM of each primer, and 5 μl of diluted lysate supernatant. Primer pairs involved one mini-Tn-specific primer and one genome-specific primer, and each primer pair probes for integration in either T-RL of T-LR orientation. PCR amplicons were generated over 30 PCR cycles, and were resolved by gel electrophoresis on 1-1.5% agarose stained with SYBR Safe (Thermo Scientific). PCR reactions for K. oxytoca and P. putida were done using similar primer design as E. coli, with Q5 Polymerase in a standard 50 μl reaction mixture, and with 20 ng extracted gDNA as input instead of cell lysate.

[0196] qPCR reactions were performed on 2 μl of diluted lysates in 10 μl reactions, containing 5 μl SsoAdvanced Universal SYBR Green 2× Supermix (BioRad), 2 μl of 2.5 μM mixed primer pair, and 1 μl H2O. Each lysate sample was analyzed with 3 separate qPCR reactions involving 3 primer pairs: two pairs each involving one mini-Tn-specific primer with one genomic-specific primer probing for either the T-RL or T-LR integration orientation, and one pair with two genome-specific reference primers at the rssA locus. Primer pairs were designed to amplify a product between 100-250 bp, and were confirmed to have amplification efficiencies between 90%-110% using serially diluted lysates. The qPCR primers used in this study are provided in SEQ ID NOs: 172-242. Integration efficiency (%) for each insertion orientation is defined as 100×(2\hat{ }ΔCq), where ΔCq is the Cq(genomic reference pair)−Cq(T-RL pair OR T-LR pair): total integration percentage is the sum of both orientation efficiencies.

[0197] Isolation of clonally-integrated E. coli colonies. Due to the potential for colonies becoming polyclonal as integration occurs alongside colony expansion, all clonal isolation steps were preceded by a “bottlenecking” step, where all colonies were scraped, resuspended in LB, and plated at an appropriate dilution to obtain a new set of colonies. Colonies were then picked and resuspended in 100 μl of MQ water, followed by lysis at 95° C. for 10 min. 5 μl of lysate was then used as input template for Q5 PCR as described above. Colonies were identified as clonal using three sets of PCRs per target site per lysate. Briefly, two PCR pairs probed for the presence of either T-RL or T-LR integration, respectively, and a third pair amplified across the genomic region of the expected insertion junction. A colony was considered clonal when only one of the first two primer pairs leads to amplification, and the third pair amplified solely a larger product that corresponds to the genomic region plus the mini-Tn. Where crRNA-4 (targeting lacZ) was used for integration, blue-white screening was used to select for white colonies, which were then confirmed with the above PCR strategy.

[0198] Liquid culture time course. pSPIN plasmids with constitutive promoters, which were extracted from NEB Turbo cloning cells, contained contaminating gDNA with targeted integration that was detectable at low levels with both end-point PCR as well as qPCR, especially at early timepoints after transformation with pSPIN. To avoid this artifact for time-course experiments, plasmids were passaged in and extracted from E. coli strain BW25113, which does not have the corresponding genomic site targeted by crRNA-4.

[0199] For each sample in the time-course experiment, three separate transformations were performed and were pooled together after a 1-hour recovery at 37° C. The pooled recovery was then split into three equal volumes, each used to inoculate a 25 mL liquid LB outgrowth culture. The cultures were incubated with shaking continuously for 24 h at either 37° C. or 30° C. At each time point indicated in FIG. 17, a 1 mL sample volume was taken from each liquid culture for OD600 measurement (WPA Biowave, 2.0 max reading) and subsequent analysis of integration efficiencies by qPCR. To avoid effects of ongoing integration within these collected samples, samples from liquid cultures were either lysed at 95° C., or frozen at −20° C., within 10 minutes from collection. For earlier time points with dilute cultures, 1 mL samples were pelleted entirely, and each were resuspended in a sufficient volume to achieve a Cq value of 18-20 for the genomic qPCR primer pair. For later time points with significantly turbid cultures, dilution of the sample was performed based on the OD600 measurements, as described in the qPCR section above.

[0200] Transposition with linear donor. Linear donors were generated by PCR amplification of a 1104 bp donor sequence containing a full chloramphenicol resistance cassette from a non-replicative plasmid template. A subsequent DpnI digestion and gel extraction step ensured no intact plasmid was present in the linear donor sample. Control transformations of the resulting amplicons were performed into an E. coli pir+ strain that can support replication of the template plasmid to confirm that there was no contaminating plasmid left in the linear DNA sample.

[0201] Competent cells carrying a constitutive pEffector plasmid with either a non-targeting crRNA or crRNA-4 were transformed with 500-600 ng of the linear donor using heat-shock transformation as described above. After a 1 h recovery at 37° C., cells were plated directly onto chloramphenicol selection. After a 16 h incubation at 37° C. the resulting colonies were counted. Colonies were then scraped and bottlenecked onto a fresh agar plate with chloramphenicol selection, followed by PCR analysis of colonies as described above.

[0202] VchINT target immunity experiments. A pSPIN derivative with crRNA-4 (targeting lacZ) on a pSC101* temperature-sensitive backbone was used to insert a 0.98 kb mini-Tn into BL21(DE3) cells at 30° C. for 30 hours. A clonal-insertion strain was isolated as described above, and the pSPIN plasmid was cured by culturing cells at 37° C. overnight in liquid LB media. Resulting cells were made chemically competent, and a separate pDonor containing a different cargo was transformed alongside a pEffector construct with a crRNA targeting a site d (bp) away from the original crRNA-4 target (as indicated in FIG. 3A). qPCR was then performed, where Tn-specific primers were designed to bind in the cargo in order to distinguish it from the original crRNA-4 insertion. For each target site, normalization was done by performing the same transposition and qPCR assay in WT BL21(DE3) cells, and dividing the immunized qPCR efficiency by the WT efficiency. Due to the presence of two identical repeats of the mini-Tn right end and left end (111 bp and 149 bp, respectively) from the original and new insertions, it is possible that the observed target immunity phenotype is affected by low-level recombination between these repetitive sequences, which is not taken into account in the analyses.

[0203] Mini-Tn remobilization experiments. BL21(DE3) cells with a clonal crRNA-4 (lacZ) insertion, isolated and cured of INTEGRATE plasmids as described above, was made chemically competent. A pEffector construct with crRNA-1 (targeting downstream of glmS) was transformed into these cells, without a donor plasmid containing a new mini-Tn. Presence of the mini-Tn at both lacZ and glmS was probed for by PCR as described above.

[0204] Mini-Tn-competition experiments were set up similarly, where a pEffector construct with crRNA-1 was transformed along with a pDonor which carries the same mini-Tn as the lacZ-insertion, except for a 5-bp mutation at the 3′ end of the R-end. This mutation site was used to design Tn-specific primers to distinguish the genomic-insertion and plasmid-borne mini-Tn at both lacZ and glmS sites.

[0205] VchINT/ShoINT orthogonality experiments. For the orthogonality experiments in FIG. 3C, BL21(DE3) cells were co-transformed with a two-plasmid combination of either Vch-pEffector or Sho-pEffector, and either Vch-pDonor or Sho-pDonor. The spacers for both systems were designed to target the same region of the lacZ locus. For PCR analysis of integration activity, due to the two pDonors carrying the same cargo, transposon-specific primers were designed to bind in the R-end or L-end of the mini-Tn.

[0206] For data shown in FIG. 3D, Sho-pEffector and Sho-pDonor were co-transformed into BL21(DE3) containing a clonal lacZ-insertion. The Sho-sgRNA was designed with a spacer targeting a similar region near the glmS locus that is targeted by Vch-crRNA-1. PCR analysis was performed as described above.

[0207] Amino acid auxotrophy experiments. M9 minimal media was prepared with the following components: 1×M9 salts (Difco), 0.4% glucose, 2 mM MgSO4, and 0.1 mM CaCl2. M9 agar was prepared as above, with the addition of 15 g/l of Dehydrated agar (BD). L-threonine and/or L-lysine was supplemented at 1 mM as indicated.

[0208] For individual thrC or lysA targeting experiments, BL21(DE3) cells were transformed with a pSPIN construct with a crRNA targeting either gene. Transformed cells were incubated on LB agar at 37° C. for 24 hours. Bottlenecking and clonal insertions identification by PCR were performed as described above, and cells were then evaluated for ability to grow in M9 minimal media with and without addition of the appropriate amino acid.

[0209] For multiplexed targeting of both thrC and lysA, BL21(DE3) cell were transformed with a pSPIN construct expressing a thrC-lysA-targeting double-spacer array. Cells were then incubated and bottlenecked on LB agar as above, and bottlenecked colonies were then stamped onto M9 agar plates supplemented with either no amino acids, only threonine or lysine, or both amino acids, to identify growth phenotype. For data presented in FIG. 4E, this screen was performed on 30 colonies for each of three independent experiments.

[0210] OD600 growth curve analysis was performed by first inoculating WT BL21(DE3) or isolated auxotrophic strains from −80° C. glycerol stocks into LB media for overnight growth. 1 ml of each culture was then pelleted at 16000 g and resuspended in 1 ml MQ water, and was inoculated at a 1:1000 dilution into the respective growth media on a 96-well cell culture plate. Growth assay was then performed with a Synergy H1 plate reader shaking at 37° C. for 18 hours, and OD at 600 nm taken every 5 min. Each sample was measured in three technical-replicates in separate wells on the sample plate, and were normalized to blank wells containing media only.

[0211] Cre-Lox genomic deletion experiments. BL21(DE3) cells were transformed with a pSPIN construct containing a double-spacer CRISPR array containing crRNA-4 and a second spacer targeting the same strand either 2.4-, 10- or 20-kb away from crRNA-4. The mini-Tn of this construct was previously modified to include a 34-bp recognition sequence for Cre recombinase. Cells were incubated and bottlenecked, and colonies with double-clonal insertions were isolated by a combination of blue-white screening and PCR, as described above. Although the two targets for the 2.4-kb deletion were within each other's range for target immunity effects, the desired clones were still readily isolated. Double-insertion clones were made chemically competent, and were then transformed with a plasmid expressing Cre recombinase from an IPTG-inducible 17 promoter. Cells were incubated at 37° C. for 16 hours and bottlenecked, and colonies having undergone recombination were isolated by PCR. Small colonies and very low transformation efficiencies were observed when transformed cells were plated on 0.1 mM IPTG, while recombined clones were readily able to be isolated without IPTG induction, suggesting that small amounts of Cre resulting from leaky T7 expression were sufficient for recombination. Thus, all Cre-recombinase transformations were performed with no IPTG present.

[0212] Tn-seq library preparation and sequencing. Transformations for Tn-seq transposition assays were carried out as described above, using donor plasmids containing a mini-Tn where the 8-nt terminal repeat of the mini-Tn R-end was mutated to contain an MmeI recognition sequence. It was previously shown that a mini-Tn with this mutation is still functionally active, with a ˜50% decrease in total integration efficiency (Klompe, S. E., et al., Nature 571, 219-225 (2019), incorporated herein by reference in its entirety). Transformed cells were incubated on LB agar at 37° C. for 24 hours, except for assays shown in FIGS. 9D and 9F, where cells were incubated at 30° C. for 30 hr. Colonies were then scraped and resuspended in liquid LB media, and 0.5 ml (approximately 2×10⁹ cells) were used for gDNA extraction with the Wizard Genomic DNA Purification kit (Promega), which typically yielded 50 μl of 0.5-1.5 μg/μl gDNA.

[0213] NGS libraries were prepared in parallel in PCR tubes, each with 1 μg of gDNA first being digested with 4 U of MmeI (NEB) for 2 hours at 37° C., in a 50 μl reaction containing 50 μM S-adenosyl methionine and 1× CutSmart buffer, followed by heat inactivation at 65° C. for 20 min. MmeI digestion results in the generation of 2-nucleotide 3′-overhangs. Reactions were cleaned up with 1.4× Mag-Bind TotalPure NGS magnetic beads (Omega) according to the manufacturer's instructions, and elutions were done using 30 μl of 10 mM Tris-Cl, pH 7.0. Double-stranded i5 universal adaptors containing a 3′-terminal NN overhang were ligated to the MmeI-digested gDNA in a 20 μl ligation reaction consisting of 16.86 μl of MmeI-digested gDNA, 5 nM adaptor, 400 U T4 DNA ligase (NEB), and 1×T4 DNA ligase buffer. Reactions were left at room temperature for 30 min, and were then cleaned with magnetic beads. Since the donor plasmid (either pDonor, pSPIN or pSPIN-R) contains a copy of the mini-Tn that can also be digested with MmeI and ligated with i5 adaptor, a restriction enzyme recognition site (HindIII for pDonor, or Bsu36I for pSPIN and pSPIN-R) was included in the 17-bp space between the 5′ end of the mini-Tn and the MmeI digestion site. This allowed us to reduce contamination of donor sequences within the NGS libraries, by digesting the entirety of the adaptor-ligated gDNA elution with 20 Units of HindIII or Bsu361 in a 34.4 μl reaction for 2 hours at 37° C., before a heat inactivation step at 65° C. for 20 min. DNA clean-up using magnetic beads was then performed.

[0214] Eluted DNA was then amplified in a PCR-1 step, where adaptor-ligated transposons were enriched using a universal i5-adaptor primer and a transposon-specific primer with a 5′ overhang containing a universal i7 adaptor. In a 25 μl PCR-1 reaction. 16.7 μl of HindIII/Bsu36I-digested gDNA was mixed with 200 μM dNTPs, 0.5 μM primers, 1×Q5 reaction buffer, and 0.5 U Q5 DNA Polymerase (NEB). Amplification proceeded for 25 cycles at an annealing temperature of 66° C. 20-fold dilutions of the reaction products were used as template for a second 20 μl PCR reaction (PCR-2) with indexed p5/p7 Illumina primers. The PCR-2 reaction was subjected to 10 additional amplification cycles with an annealing temperature of 65° C., after which analytical gel electrophoresis was performed to verify amplification for each library. Barcoded reactions were pooled and resolved by 2.5% agarose gel electrophoresis, followed by isolation of DNA using Gel Extraction Kit (Qiagen), and NGS libraries were quantified by qPCR using the NEBNext Library Quant Kit (NEB). Illumina sequencing was performed with a NextSeq mid-output kit with 150-cycle single-end reads and automated adaptor trimming and demultiplexing (Illumina). The plasmid contains a full-size MmeI-mini-Tn, where there is no Bsu36I restriction site in the 17-bp fingerprint space—thus this fingerprint survives the Bsu36I donor digestion step for pSPIN libraries, and provides a constant “contamination” into the library to control for sequencing depth.

[0215] For pSPIN libraries involving a spike-in, 10 μl of a 0.02 ng/p spike-in plasmid was added to each 1 μg DNA sample prior to MmeI digestion, and library preparation proceeded as described above. The plasmid contains a full-size MmeI-mini-Tn, where there is no Bsu36I restriction site in the 17-bp fingerprint space—thus this fingerprint survives the Bsu36I donor digestion step for pSPIN libraries, and provides a constant “contamination” into the library to control for sequencing depth.

[0216] Random fragmentation library prep and sequencing. BL21(DE3) cells were transformed with Vch-pSPIN or Sho-pSPIN, or were co-transformed with pHelper and pDonor for ShCAST. Transformation, incubation and gDNA extraction with the Wizard Genomic DNA Purification kit (Promega) were performed as described previously.

[0217] Following the NEBNext® dsDNA Fragmentase protocol, about 2.5 μg of gDNA was fragmented for 14 min. The fragmentation reactions were purified using 1.4× Mag-Bind® Total Pure NGS (Omega) beads with an elution step in 30 μl 1×TE. Approximately 1 μg of the fragmented DNA was used for end preparation, adapter ligation and USER cleavage, according to the NEBNext Ultra II DNA Library Prep Kit for Illumina protocol. The reactions were purified using 1.2× Mag-Bind® Total Pure NGS (Omega) beads with an elution step in 30 μl MQ water.

[0218] To reduce the number of fragments deriving from the mini-Tn on the donor plasmid, the samples were digested with restriction enzymes (VchINT-KpnI/Bsu36I, ShoINT-PstI/HindIII, ShCAST-NcoI/AvrII) overnight at 37° C. The reactions were then purified using 1.2× Mag-Bind® Total Pure NGS (Omega) beads with an elution step in 30 μl MQ water.

[0219] PCR-1 reactions were performed using Q5 Polymerase (NEB) in a 20 μl reaction containing 200 μM dNTPs, 0.5 μM of each primer, and 30 ng of input DNA. A transposon-specific primer carrying an i5 adapter, and an i7-specific primer specifically amplified transposon containing fragments over 20 PCR cycles. A second PCR reaction (PCR-2) was used to add specific Illumina index sequences to the i5 and i7 adapters over 10 PCR cycles in a 25 μl reaction with 1.25 μl from PCR-1 as the input DNA.

[0220] Samples were purified using the Qiagen PCR Clean-up Kit, and their DNA concentrations were measured using a DeNovix spectrometer. The amount of DNA was normalized and samples were combined. The pooled libraries were then quantified using the NEBNext® Library Quant Kit for Illumina, and Illumina sequencing was performed as described above.

[0221] Analysis of NGS data. All analyses of Tn-seq and random fragmentation sequencing data were performed using a custom Python pipeline. Demultiplexed raw reads were filtered to remove reads where less than half of the bases passed a Phred quality score of 20 (Q20—corresponding to >1% base miscalling). Reads that contained the 15-bp 5′ terminal sequence of the mini-Tn R-end (allowing up to one mismatch) were then selected, and the 17-bp sequence directly upstream of this R-end sequence was extracted. This 17-bp “fingerprint” sequence corresponds to the distance from the R-end to the MmeI digestion site, and contains the sequence context in which the mini-Tn is found (FIG. 8A). Reads without sufficient length to extract a 17-bp fingerprint were removed from analysis. For each random fragmentation sample, since the two transposon ends were amplified and sequenced as two separate libraries, extraction of fingerprints from reads were performed separately for the R and L transposon ends.

[0222] Fingerprint sequences were aligned to reference genomes of the corresponding species and strain, depending on each specific library. The full list of strains, species, and corresponding reference genome accession identifiers is provided in FIG. 20: reference genomes for E. coli and P. putida were obtained from published NCBI genomes, whereas the K. oxytoca parent strain was sequenced and assembled de novo using whole-genome SMRT sequencing to obtain the reference genome (see below for SMRT sequencing method). Alignment to reference was performed using the bowtie2 alignment library—perfect mapping was used for alignment, and only reads that aligned exactly once to the reference genome were used for downstream analyses. Fingerprints that did not map to the reference genome were screened for sequences corresponding to undigested donor contamination, or for fingerprints mapping downstream of the CRISPR array on the donor plasmid, which correspond to self-targeting events (FIGS. 5D and 5E). For cases where a spike-in plasmid was used, the number of fingerprints containing the spike-in sequence was also determined.

[0223] Bowtie2 alignment outputs were used to generate genome-wide integration distributions, the number of reads corresponding to integration events at each position across the reference genome was plotted. For visualization purposes, these positions were grouped into 456 separate 10-kb bins, and peaks were plotted as a percentage of total reads. In cases where a spike-in was used, peaks were further normalized by the number of spike-in fingerprints detected, and the plot each non-targeting control was plotted to the same y-axis scale as its corresponding targeting sample. This analysis was performed similarly for each random fragmentation library by combining R-end and L-end fingerprints prior to alignment and plotting.

[0224] Integration-site distance distribution plots were generated from bowtie2 alignments by plotting number of reads against the distance between the 3′ end of the protospacer and the site of insertion corresponding to the reads, at single-bp resolution. The on-target % was calculated as the percentage of reads corresponding to integration events within a 100-bp window centered at the integration site with the largest number of reads. The orientation bias of integration which was define as the ratio of number of reads corresponding to T-RL insertions to those corresponding to T-LR insertions. For random fragmentation libraries, alignments for this analysis were performed separately for R-end and L-end fingerprints, and the results were combined to generate the plot.

[0225] Tn-seq sequencing is susceptible to potential biases arising from differences in MmeI digestion efficiency at each site, and in ligation efficiencies of 3′-terminal NN overhang adaptors, which were not taken into account by downstream analyses.

[0226] PacBio SMRT sequencing and analysis. gDNA samples for library preparation were extracted from overnight LB cultures using the Wizard Genomic DNA Purification kit (Promega) as described above. Multiplexed microbial whole genome SMRTbell libraries were prepared as recommended by the manufacturer (Pacific Biosciences). Briefly, two micrograms of high molecular weight genomic DNA from each sample (n=12 per pool) was sheared using a gO-tube to ˜10 kb (Covaris). These sheared gDNA samples were then used as input for SMRTbell preparation using the Template Preparation Kit 1.0, where each sample was treated with a DNA Damage Repair and End Repair mix, in order to repair nicked DNA and repair blunt ends. Barcoded SMRTbell adapters were ligated onto each sample in order to complete SMRTbell library construction, and then these libraries were pooled equimolarly, with a final multiplex of 12 samples per pool. The pooled libraries were then treated with exonuclease III and VII to remove any unligated gDNA, and cleaned with 0.45× AMPure PB beads to remove small fragments and excess reagents (Pacific Biosciences). The completed 12-plex pool was annealed to sequencing primer V3 and bound to sequencing polymerase 2.0 before being sequenced using one SMRTcell 8M on the Sequel 2 system with a 20-hour movie.

[0227] After data collection, the raw sequencing reads were demultiplexed according to their corresponding barcodes using the Demultiplex Barcodes tool found within the SMRTLink analysis suite, version 8.0. Demultiplexed subreads were downsampled 10-fold by random downsampling, and assembled de novo using the Hierarchical Genome Assembly Process (HGAP) tool, version 4.0 using the following parameters: Aggressive mode=off, Downsampling factor=0, Minimum mapped length=50 bp, Seed coverage=30, Consensus algorithm=best, Seed length cutoff=−1, Minimum Mapped Concordance=70%.

[0228] Subread mapping and structural variant analysis were performed using the PB-SV tool within SMRTLink 8.0, using the BL21(DE3) genome (Accession CP001509.3) as reference, with the following parameters: Minimum SV length=20 bp, Minimum reads supporting variant for any one sample=2, Minimum mapped length=50 bp, Minimum length of copy number variant=1000 bp, Minimum reads supporting variant (total over all samples)=2, Minimum % of reads supporting variant for any one sample=20%, Minimum mapped concordance=70%. VCF outputs was used to generate SV analysis results, and BAM alignments were visualized with IGV to generate genome-deletion coverage plots (FIG. 14). No evidence of co-integrate products was found for Vch INTEGRATE, consistent with transposition proceeding through a cut-and-paste pathway dependent on both TnsA and TnsB.

[0229] For the coverage plot of the 10-kb insertion (FIG. 9G), circular consensus sequence (CCS) reads were generated with SMRTLink 8.0, and were then filtered using a custom Python script to obtain only reads containing 20 bp of the R-end and/or the L-end of the mini-Tn, where the 20-bp regions directly adjacent to these R/L-end sequences do not map to pDonor. These filtered reads were then aligned to an artificial reference genome, where the entire 10-kb mini-Tn was inserted 49 bp downstream of the crRNA-4 target sequence of the CP001509.3 reference genome, using Geneious Prime at medium sensitivity with no fine-tuning.

[0230] Isolation of live mouse gut bacteria. Conventionally raised B6 and BALB/C female mice (Taconic Biosciences Laboratories) were the source of the two different mammalian gut complex communities used in this study. Fresh fecal pellets were collected from mice, and live gut bacteria were isolated by mechanical homogenization. Briefly, 250 μl of PBS was added to previously weighed pellets in a microcentrifuge tube. Pellets were thoroughly mechanically disrupted with a motorized pellet pestle, and then 750 μl of PBS was added. The disrupted pellets in PBS were then subjected to four iterations of vortex mixing for 15 s at medium speed, centrifugation at 1,000 r.p.m. for 30 s at room temperature, recovery of 750 μl of supernatant in a new tube, and replacement of that volume of PBS before the next iteration. The resulting 3 ml of isolated cells were pelleted by centrifugation at 4,000 g for 5 min at room temperature, the supernatant was discarded, and cells were resuspended in 0.5-1.0 ml of PBS. All gut bacteria isolations were performed in an anaerobic chamber (Coy Labs).

[0231] Ex vivo conjugation using INTEGRATE to target specific strains in natural complex communities. Before conjugation, donor strains harboring conjugative pSPIN vectors were grown from a single colony in 5 ml of LB-Lennox media (BD) supplemented with 50 μg/ml kanamycin and 50 μM DAP at 37° C. overnight (˜10 h). The recipient community was isolated anaerobically from fresh mouse feces as described above, immediately before conjugation. Donor cells were washed three times in PBS and quantified by OD600, whereas fecal bacteria were quantified by flow cytometry using SYTO9 staining. 108 or 107 donor cells (E. coli strain EcGT2 containing pSPIN) and 108 target cells (K. oxytoca strain M5a1) were mixed with 109 fecal bacteria cells, pelleted by centrifugation at 4,000 g, and resuspended in 10-20 μl of PBS. The mixes were spotted on MGAM+2% agar plates supplemented with 50 μM DAP and incubated at 37° C. anaerobically for 24 h. After conjugation, cells were scraped from the plate into 1 ml of PBS and plated on LB-Lennox agar and LB-Lennox 2% agar supplemented with 50 μg/ml kanamycin at different dilutions.

[0232] Metagenomic 16S sequencing. Genomic DNA from fecal bacterial extraction was isolated using mechanical lysis with 0.1 mm Zirconia beads (Biospec) and subsequently purified with SPRI beads (AMPure). PCR amplification of the 16S rRNA V4 region and multiplexed barcoding of samples were done in accordance with previous protocols. The V4 region of the 16S rRNA gene was amplified with customized primers according to the method described by Kozich et al. (Appl Environ Microbial 79, 5112-5120 (2013), incorporated herein by reference in its entirety), with the following modifications: (i) alteration of 16S primers to match updated EMP 505f and 806rB primers, and (ii) use of NexteraXT indices such that each index pair was separated by a Hamming distance of >2, so that Illumina low-plex pooling guidelines could be used. Sequencing was done with the Illumina MiSeq system (300V2 kit) immediately before the experiment (TO) and after 24 h (T24).

[0233] Analysis of 16S next-generation sequencing data. The composition of the communities for each sample was determined from 16S sequencing data via DADA2 pipeline to generate the amplicon sequence variance (ASV) tables and calculate relative abundances. Phyloseq and Silva database were used to assign the taxonomy. In the MiSeq run, two blank controls with sterile water as input material were included to check for contaminants in the reagents, and to filter out contaminant ASVs if present. Reads mapping to nonbacterial DNA (e.g., mitochondria, plastids, or other eukaryotic DNA) were also excluded from the analysis. Only ASVs with more than 15000 reads and present in more than 1% of the samples were considered in the downstream analysis.

[0234] Quantification of site-specific transposition efficiency in bacterial communities. Different dilutions from the community conjugations were plated on LB with kanamycin selection (50 μg/mL) for pSPIN. Between 40 to 66 colonies were picked each single experiment (˜15 to 20 colonies per replicate in order to capture at least 5% efficiency), and transposon-genome junction PCRs and 16S PCRs were run for each single colony. Junction PCRs were run on 1% agarose gel to confirm the integration, and 16S Sanger sequencing confirmed that each colony was K. oxytoca.

### Example 1

### An Optimized, Single-Plasmid System for High-Efficiency RNA-Guided DNA Integration

[0235] A three-plasmid expression system was previously employed to reconstitute RNA-guided DNA integration in E. coli, whereby pQCascade and pTnsABC encoded the necessary protein-RNA components, and pDonor contained the mini-transposon (mini-Tn, aka donor DNA) (FIG. 1C). To streamline the strategy and eliminate both antibiotic burden and the need for multiple transformation events, number of independent promoters and plasmids was serially reduced the and ultimately arrived at a single-plasmid INTEGRATE construct (pSPIN), in which one promoter drives expression of the crRNA and polycistronic mRNA, directly upstream of the mini-Tn (FIGS. 1C and 6). This design allows modular substitution of the promoter and/or genetic cargo for user-specific applications, and straightforward subcloning into distinct vector backbones.

[0236] After identifying a functionally optimal arrangement of the CRISPR array and operons (FIG. 6), E. coli BL21(DE3) was transformed with four pSPIN derivatives encoding a lacZ-specific crRNA on distinct vector backbones, and the efficiency of RNA-guided transposition was monitored by quantitative PCR (qPCR). Surprisingly, the streamlined plasmids exhibited enhanced integration activity, with efficiency exceeding 90% using the pBBR1 vector backbone (FIG. 1D), and showed substantially stronger bias for insertion events in which the transposon right end was proximal to the target site (T-RL), as compared to the original three-plasmid expression system (FIG. 7). To determine whether increased efficiency would translate across multiple targets, integration at five target sites, the pSPIN vector was assessed and consistently 2-5× more efficient (FIG. 1E). The single-plasmid INTEGRATE system maintained high-fidelity activity, and an absence of insertion events with a non-targeting crRNA, as reported by genome-wide transposon-insertion sequencing (Tn-seq: FIGS. 1F and 8). This high degree of specificity was further verified by isolating clones and confirming the unique presence of a single insertion by whole-genome, single-molecule real-time (SMRT) sequencing and structural variant analysis.

[0237] Using a panel of constitutive promoters of varying expression strength, higher expression drove higher rates of integration, without any deleterious effect on genome-wide specificity (FIGS. 2A-2B and 9A). Efficient integration was also driven by a natural broad-host promoter recently adopted for metagenomic microbiome engineering (FIG. 2A), and the use of constitutive promoters allowed demonstration of high-accuracy integration in additional E. coli strains, including MG1655 and BW25113, without any requirement for host recombination factors (FIGS. 9B-9C). Interestingly, that RNA-guided DNA integration readily proceeded when cells were grown at room temperature, and reached ˜100% efficiency (without selection for the integration event) while maintaining 99.7% on-target specificity, even for the low-strength J23114 promoter (FIGS. 2C and 9D).

[0238] The kinetics of transposition in liquid culture experiments were also followed. For both strong and weak promoters, the integration efficiency plateaued as the cells approached stationary phase at 37° C., suggestive that rapid growth of the bacterial population at higher temperatures can limited transposition (FIG. 17A). This effect was most apparent for the low-strength J23114 promoter, where the slower onset of exponential growth at 30° C. allowed more time for integration to reach its maximum efficiency of ˜90%. In addition, simple dilution of a culture grown at 37° C. into fresh media also boosted integration efficiencies (FIG. 17B). It was also found that integration products could be detected within 2 hours after transformation (FIG. 17C), suggestive that the system can be deployed without conventional replicating plasmids. When the donor DNA encoding chloramphenicol resistance was delivered into cells in the form of a linear PCR product, drug-resistance clones that uniformly contained the on-target insertion were readily isolated (FIG. 17D).

[0239] It was previously found that while the V. cholerae machinery integrated a ˜1-kb cargo with optimal efficiency, larger cargos were poorly mobilized. Remarkably, when protein-RNA components were expressed from a single effector plasmid (pEffector-B, FIG. 6C) and cultured cells at 30° C., mini-transposons spanning 1-10 kb with ˜100% efficiency, were integrated with no observable size-dependent effects (FIG. 2D) and without the need for marker selection. The same pattern was observed across multiple target sites and promoters, and the specificity of 10-kb insertions was verified by Tn-seq and SMRT sequencing (FIGS. 2D and 9e-9G). To further leverage the large-cargo capability, a single-plasmid autonomous INTEGRATE system (pSPAIN) was generated in which the protein-RNA coding genes were cloned within the mini-Tn itself, and this construct also directed targeted integration at ˜100% efficiency (FIG. 2E). Autonomous INTEGRATE systems, by virtue of mobilizing themselves according to the user-defined CRISPR array content, are capable of programmed self-propagation in mixed community environments.

### Example 2

### Development of Orthogonal Integrases for Iterative DNA Insertions

[0240] A derivative of pSPIN was cloned using a temperature-sensitive plasmid backbone, a clonal strain containing a lacZ-specific insertion (target-4) was isolated, and the plasmid was cured. Next, the machinery to generate a proximal insertion at variable distances was re-introduced upstream of target-4, but using a mini-Tn whose distinct cargo could be selectively tracked by qPCR (FIG. 3A). Previous studies have demonstrated that Tn7 and Tn7-like transposons exhibit target immunity, whereby integration is prevented at target sites already containing another transposon copy. Integration across a panel of crRNAs for strains with and without a pre-existing mini-Tn was compared and the V. cholerae transposon also exhibited target immunity, with ˜20% relative efficiency at target sites ˜5-kb away (FIG. 3A). This effect was ablated when a glmS-proximal site (target-1) that was >1 Mbp from the pre-existing insertion was targeted.

[0241] The simultaneous presence of a genomically integrated mini-Tn and distinct plasmid-borne mini-Tn produces an interesting scenario in which the transposase machinery can theoretically employ either DNA molecule as the donor substrate for integration (FIG. 10A). Using cargo-specific primers, new insertions at target−1 were indeed a heterogeneous mixture of both mini-Tn donors, although the higher-copy plasmid source was heavily preferred (FIG. 10A). To further investigate intramolecular transposition events, the clonally integrated strain was transformed with a plasmid encoding the protein-RNA machinery without donor DNA, and monitored re-mobilization of the pre-existing mini-Tn from target-4 to target-1. Integration at target-1 was readily observed, but surprisingly, there was no PCR evidence of mini-Tn loss at target-4, despite the expectation that the transposon mobilizes through a cut-and-paste mechanism (FIG. 3B), suggesting that lesions resulting from donor DNA excision are rapidly resolved by HR, as has been observed with Tn747.

[0242] To avoid any low-level contamination between donor DNA molecules, the use of multiple RNA-guided transposases whose cognate transposon ends would be recognized orthogonally was explored. Guided by prior bioinformatic description and experimental validation of transposons encoding Type V-K CRISPR-Cas systems, a new INTEGRATE system derived from Scytonema hofmannii strain PCC 7110 (hereafter ShoINT, FIG. 10B) was developed; the protein components are 30-55% identical to the homologous system described by Strecker and colleagues (ShCAST), which derives from a distinct S. hofmannii strain (FIG. 19). ShoINT catalyzes RNA-guided DNA integration with 20-40% efficiency, and strongly favors integration in the T-LR orientation, albeit with detectable bidirectional integration at multiple target sites (FIGS. 5C-5E). Next, pEffector plasmids for the V. cholerae INTEGRATE system (VchNT) or ShoINT were combined with either its own cognate pDonor or pDonor from the other system, and each RNA-guided integrase was exclusively active on its respective mini-Tn substrate (FIG. 3C). With this knowledge, a new cargo was sequentially introduced at different locus (at target-1) using ShoINT, without any secondary mobilization of the pre-existing VchINT mini-Tn (at target-4) (FIG. 3D). This approach of using systems with transposon ends that are sufficiently distinct enables orthogonal and iterative integration events for distinct genetic payloads.

[0243] After developing an alternative, unbiased NGS approach to query genome-wide integration events, which does not require the MmeI restriction enzyme used in Tn-seq, the random fragmentation-based method was verified to return similar specificity information for VchINT (FIG. 11A). When the same method was applied to ShoINT and ShCAST, only ˜5-50% integration events were on-target, with substantial numbers of insertions distributed randomly across the genome (FIGS. 11B-11C).

### Example 3

### Single-Step Multiplex DNA Insertions Using INTEGRATE

[0244] Multi-spacer CRISPR arrays provided a means to direct integration of the same cargo at multiple genomic targets simultaneously (FIG. 4A), which significantly reduces time and complexity for strain engineering projects requiring multi-copy integration. a series of multiple-spacer arrays into pSPIN were cloned, and the integration efficiency of a lacZ-specific crRNA was unchanged for two spacers and reduced by <2-fold for three spacers, depending on relative position, when cells were cultured at 37° C. (FIG. 4B). Tn-seq analyses with double- and triple-spacer arrays revealed >99% on-target transposition, with characteristics that were otherwise indistinguishable from single-plex insertions for each target site (FIGS. 4C and 12), and were further verified multiplex insertions by whole-genome SMRT sequencing of double- and triple-insertion clones.

[0245] To further confirm that simultaneous insertions were indeed occurring within each individual chromosome rather than population-wide, an experiment to generate auxotrophic E. coli strains requiring both threonine and lysine for viability by insertionally inactivating thrC and lysA48 were designed (FIGS. 4D and 13A-13C). Double-knockout clones could be rapidly isolated after a single transformation step (FIG. 4E) and exhibited selective growth in M9 minimal media only when both threonine and lysine were supplemented (FIG. 4F). To probe the stability of integration-based knockouts, clones were cultured in rich media for five serial overnight passages without removing the expression plasmid and observed no change in the media requirements (FIG. 13D).

### Example 4

### One-Step Genomic Deletions Using INTEGRATE

[0246] Finally, the combined use of RNA-guided integrases with site-specific recombinases to mediate facile programmable, one-step genomic deletions was explored. Specifically, a LoxP site was inserted within the mini-Tn cargo and generated double-spacer CRISPR arrays to drive multiplex integration at two target sites. Subsequently, Cre recombinase was used to excise the chromosomal region within the LoxP sites, thus resulting in a precise deletion containing a single mini-Tn (FIG. 4G). CRISPR arrays were designed to produce 2.4-, 10-, and 20-kb deletions, which were confirmed via diagnostic PCR analysis and unbiased, whole-genome SMRT sequencing (FIGS. 4H-4I and 14).

### Example 5

### Broad Host-Range Activity of RNA-Guided Integrases

[0247] Mobile genetic elements, especially transposons, often ensure their evolutionary success by functioning robustly across a broad range of hosts, without a requirement for specific host factors. Given this expectation, as well as the efficiency with which the V. cholerae machinery directs RNA-guided transposition in E. coli, INTEGRATE activity was evaluated in other Gram-negative bacteria; Klebsiella oxytoca, a clinically relevant pathogen implicated in drug-resistant infections and emerging model organism for biorefinery, and Pseudomonas putida, an important bacterial platform for biotechnological and industrial applications (FIG. 5A). Using a pSPIN derivative driven by the constitutive J23119 promoter, four non-essential metabolic genes were targeted (xylA, galK, lacZ, and malK) and one antibiotic resistance gene (ampR) in K. oxytoca, as well as intergenic regions (upstream of PP_2928 and benR) or genes previously edited (nrC, nirD, bdhA, and PP_3889) in P. putida. For all 10 targets, highly-accurate RNA-guided DNA integration were observed by both PCR and Tn-seq, with similar integration distance and orientation bias profiles as seen in E. coli (FIGS. 5B-5C and 15A-15D). DNA insertions were virtually absent with a non-target crRNA, and on-target specificity was >95% on average, with the only outlier resulting from a prominent Cascade off-target binding site (FIG. 15E). Given the potential for INTEGRATE to exhibit off-target activity similar to canonical CRISPR-Cas systems, a computational tool was developed for guide RNA design and off-target prediction (FIG. 16).

[0248] Interestingly, for two of the P. putida crRNAs, a substantial enrichment of NGS reads mapping to pSPIN were observed, precisely 48-50 bp downstream of the spacer in the CRISPR array (FIG. 5D). Evidence of very low-level self-targeting was observed in all of the E. coli Tn-seq datasets, and the apparent abundance of self-targeting insertions for P. putida crRNAs targeting nicC and bhdA genes resulted from a fitness cost of the intended knockout and concomitant selective pressure to inactivate the pSPIN expression vector. When P. putida was transformed with modified pSPIN-R vectors encoding the exact same crRNAs but at the 3′ end of the fusion transcript, self-targeting was completely abrogated (FIGS. 5E and 15F). The utility of RNA-guided integrases for programmable genetic modifications exists across diverse bacterial species.

[0249] Bacterial conjugation was used to deliver pSPIN from a donor E. coli strain into a complex bacterial community derived from the mouse gut. The pSPIN construct was designed to specifically target the lacZ locus of a K. oxytoca strain added to the community. After isolating transconjugates, robust and high-efficiency RNA-guided transposition across distinct microbiome community sources, and with different donor-to-recipient ratios, was observed (FIG. 18). Thus, RNA-guided integrases have utility for programmable genetic modifications across diverse bacterial species and within complex microbiota.

[0250] Through systematic engineering steps, an optimized set of vectors was developed to leverage INTEGRATE for targeted DNA integration applications in diverse bacterial species, without the need for DSBs, HR, or cargo-specific marker selection. These streamlined constructs may be modified to generate user-specific guide RNAs and genetic cargos, and they catalyze highly accurate, large DNA insertions at ˜100% efficiency after a single transformation step. Moreover, by repurposing the natural CRISPR array, multi-spacer CRISPR arrays within the same seamless workflow, efficient multiplexing for simultaneous insertions or programmed genomic deletions was demonstrated by using INTEGRATE in combination with Cre-LoxP, within the same seamless workflow. The mini-Tn is compatible with any arbitrary target site, thus significantly reducing the complexity of the donor DNA and accelerating the experiment compared to HR, particularly for large-scale multiplex applications and metabolic engineering. This genetic engineering toolkit can be harnessed to generate large guide RNA libraries, which will enable high-throughput screening of rationally designed targeted DNA insertions that are not easily accessible with random transposase-based strategies. Libraries of multiplexed guide RNAs can enable synthetic lethality screening and investigations of pairwise interactions at the genome scale in bacteria. Furthermore, INTEGRATE can help advance existing strain engineering technologies, particularly those currently employing site-specific or non-specific transposases that could benefit from programmable site-specific insertions. The methods disclosed herein provide a process for increasing the efficacy of genetic manipulations.

[0251] In addition to its utility for strain engineering, INTEGRATE systems may be a particularly useful for species- and target-specific genetic manipulations in mixed bacterial communities and microbiome niches via the ability to broadly deliver all the necessary machinery on a single vector by conjugation. Using compact construct designs, a fully autonomous CRISPR-transposon was generated that was capable of high-efficiency integration. Similar constructs are mobilized on broad host-range conjugative plasmids, pre-programmed with multiple-spacer CRISPR arrays, to genetically modify desired bacterial species at user-defined target sites. The system and methods disclosed herein allow gene drive applications, such as inactivating antibiotic resistance genes or virulence factors and introducing genetic circuits and synthetic pathways in a targeted manner.

### Example 6

### Bacteroides vulgatus and Other Members of the Mammalian Gut Microbiome

[0252] The Bacteroides genus constitutes ˜30% of the total colonic bacteria, and this particular strain, alongside other Bacteroides strains that include thetaiotaomicron, fragilis, and ovatus are the most commonly encountered species in the human colon. Thus, this class of organisms represents a high-value target for genetic manipulations in the context of complex human-associated bacterial communities, or microbiomes, for therapeutics and basic research purposes. In particular, the ability to eliminate resident genes and/or insert new gene and biological functionalities, in a gene- and species-specific manner, opens up new opportunities for precision microbiome engineering.

[0253] Highly-precise targeted insertions can be robustly generated in Bacteroides vulgatus using the INTEGRATE CRISPR-transposon system from V. cholerae. Targeted insertions are characterized by a combination of junction PCR and Sanger sequencing to verify the insertion products, and next-generation sequencing (NGS) to verify the genome-wide specificity. Importantly, components for the INTEGRATE CRISPR-transposon system may be introduced in Bacteroides, and other members of the gut microbiome community, either via direct delivery of the expression vectors, or via conjugation from a donor strain containing the CRISPR-transposon system components.

[0254] The pSPIN vectors, described herein, were adapted for Bacteroides through both codon optimization, inclusion of Bacteroides-specific ribosome binding sites (RBS), and inclusion of origins of replication that enable plasmid maintenance in Bacteroides. The pSPIN derivative vector also included an origin of transfer sequence, to enable conjugation from the S17 donor strain of E. coli, as described in Ronda et al. (Nat Methods 16, 167-170 (2019), incorporated herein by reference in its entirety), as well as drug markers that enable selection in Bacteroides vulgatus. The sequence of a representative entry-vector version of this Bacteroides-specific pSPIN vector, also known as pSL2130, is SEQ ID NO: 257. This vector contains BbsI restriction sites to facilitate new spacer cloning into the CRISPR array, upon selection of appropriate targeting sequences for new guide RNAs. Three spacers were chosen to introduce a site-specific insertion within the bile salt hydrolase (BSH) gene of Bacteroides vulgatus; sequences for these spacers are shown in SEQ ID NOs: 258-260, and the relative position of these (proto)spacers within the BSH gene is depicted in FIG. 21.

[0255] Bacteroides-specific pSPIN vectors containing the guide RNA of interest were introduced into the E. coli S17 donor strain through standard transformation procedures. Subsequently, conjugation reactions were prepared with Bacteroides vulgatus under anaerobic conditions, following standard procedures (See. Ronda et al., Nat Methods 16, 167-170 (2019), incorporated herein by reference in its entirety), in order to facilitate transfer of the pSPIN vector from the donor E. coli strain to the recipient B. vulgatus strain. Following initial outgrowth on non-selective media, cells were replated on media that selects for drug resistance (encoded by pSPIN) and kills the donor strain (which is engineered to be auxotrophic). After sufficient culturing, cells were harvested and analyzed for targeted DNA integration using phenotypic assays, standard PCR, qPCR, NGS, and/or whole-genome sequencing approaches.

[0256] After performing conjugation reactions with pSPIN vectors encoding guide RNAs with spacers 1, 2, and 3, each of which targets within the same BSH gene, cells were selected on drug-containing media, colonies were removed and lysed, and then the lysate was subjected to junction PCR analysis. In this PCR, a transposon and/or transposon cargo-specific primer was compared with a genome-specific primer, such that amplification products were only generated in the event of targeted integration proximal to the target site matching the guide RNA. In experiments with all three spacers, specific junction PCR product bands were generated at the expected site (FIGS. 22-24), indicating successful RNA-guided DNA integration in Bacteroides vulgatus. As has been observed previously, integration products can occur in one of two orientations, in which either the transposon ‘right’ (R) end is integrated proximally to the target site (denoted tRL or simply ‘RL’ product), or in which the transposon ‘left’ (L) end is integrated proximally to the target site (denoted tLR, or simply ‘LR’ product). As is seen in FIGS. 22-24, all three spacers had the capacity to generate insertions in either orientation, though in some cases one orientation was clearly biased/preferred over the other.

[0257] To further confirm that targeted insertions were indeed RNA-guided and “on-target,” PCR products were analyzed by Sanger sequencing. These analyses indicated that, in all cases, the transposon was inserted precisely 49-50 bp downstream of the target site. Sanger sequencing chromatograms for these analyses, aligned to the reference genome containing the insertion product, are shown in FIGS. 25-27.

[0258] The same pSPIN designs can be adapted for other bacterial species, genus, families, orders, classes, or phyla, that populate the human microbiome. The adaptation process may include optimization of various gene parts for the biology of the target organism(s), including, but not limited to, promoter elements, codon usages, ribosome binding sites, transcriptional terminators, origins of replication, conjugation machineries, and resistance markers. To enable multiplexed targeting of multiple genes within the same species, or multiple genes across multiple species, the CRISPR array is expanded to encode multiple guide RNAs, such that the CRISPR and transposase machineries can target a range of genomic sites.

[0259] Similar conjugation strategies may be applied to deliver the CRISPR-transposon system (also known as INTEGRATE) into multiple recipient organisms in a single step, in the case where a donor strain is mixed with a complex bacterial community containing more than one recipient strain. Subsequent analyses may be performed on the bulk population, or on isolated clones. In some embodiments, the entire bacterial community containing the targeted insertions are then used in downstream steps, whether for microbiome transplantation into animal or human subjects, or other downstream applications. In some embodiments, the recipient community is derived from stool samples from an animal model or from a human patient (known as a fecal microbiome or fecal bacterial community). In other embodiments, the recipient community may derive from other microbiome environments, including but not limited to other parts of the human body, soil samples, or other ecological environments.

[0260] The transposon can be programmed with a wide array of various cargo genes, or payloads, in which one or more biologically functionalities are encoded. Additionally, genes may be included that provide enhanced fitness to the recipient organism, such that insertion events are enriched without the need for drug selection.

[0261] It is understood that the foregoing detailed description and accompanying examples are merely illustrative and are not to be taken as limitations upon the scope of the disclosure, which is defined solely by the appended claims and their equivalents.

[0262] All publications and patents mentioned in the above specification are herein incorporated by reference as if expressly set forth herein. Various changes and modifications to the disclosed embodiments will be apparent to those skilled in the art and may be made without departing from the spirit and scope thereof.

What is claimed is:

1. A system for targeted nucleic acid deletions comprising:
an engineered Clustered Regularly Interspaced Short Palindromic Repeats (CRISPR)-CRISPR associated (Cas) (CRISPR-Cas) system, and/or one or more vectors encoding the engineered CRISPR-Cas system, wherein the engineered CRISPR-Cas system comprises: (a) at least one Cas protein, and (b) a pair of guide RNAs (gRNAs), wherein the pair of gRNAs is configured to hybridize to target sites flanking a nucleic acid sequence for deletion;
an engineered transposon system, and/or one or more vectors encoding the engineered transposon system;
a recombinase, or catalytic domain thereof, and/or one or more vectors encoding a recombinase, or catalytic domain thereof; and
at least one donor nucleic acid to be integrated, wherein the donor nucleic acid comprises a recognition site for the recombinase flanked by at least one transposon end sequence.

2. The system of claim 1, wherein the engineered CRISPR-Cas system and the engineered transposon system are on the same or different vector(s).

3. The system of claim 1 or 2, wherein the recombinase, or catalytic domain thereof, is on the same or different vector(s) from the engineered CRISPR-Cas system and/or the engineered transposon system.

4. The system of any of claims 1-3, wherein the recombinase, or catalytic domain thereof, comprises a tyrosine recombinase.

5. The system of any of claims 1-4, wherein the recombinase comprises Cre recombinase, a mutant, variant, or catalytic domain thereof and the recognition site comprises a lox site or variant thereof.

6. The system of any of claims 1-5, wherein the recombinase comprises flippase (FLP) recombinase, a mutant, variant, or catalytic domain thereof and the recognition site comprises a flippase recognition target (FRT) site or variant thereof.

7. The system of any of claims 1-6, wherein the recombinase, or catalytic domain thereof, comprises a serine recombinase.

8. The system of any of claims 1-7, wherein the recombinase comprises TniR resolvase, a mutant, variant, or catalytic domain thereof and the recognition site comprises a resolution (res) sequence or variant thereof.

9. The system of any of claims 1-8, wherein the recombinase comprises a Tn3-like resolvase, mutant, variant, or catalytic domain thereof and the recognition site comprises a resolution (res) sequence or variant thereof.

10. The system of any of claims 1-9, wherein the engineered CRISPR-Cas system comprises a Type V system or a Type I system.

11. The system of any of claims 1-10, wherein the engineered CRISPR-Cas system comprises Cas12k.

12. The system of any of claims 1-11, wherein the engineered CRISPR-Cas system comprises Cas5, Cas6, Cas7, Cas8, or a combination thereof.

13. The system of any of claim 1-12, wherein the engineered transposon system comprises TnsA, TnsB, TnsC, or a combination thereof.

14. The system of any of claims 1-13, wherein the engineered transposon system comprises TniQ.

15. The system of any of claims 1-14, wherein the donor nucleic acid comprises a human nucleic acid sequence.

16. The system of any of claims 1-15, wherein the donor nucleic acid further comprises a cargo nucleic acid.

17. The system of claim 16, wherein the cargo nucleic acid comprises the recognition site for the recombinase.

18. The system of any of claims 1-17, further comprising a target nucleic acid comprising the nucleic acid sequence for deletion.

19. The system of any of claims 1-18, wherein at least one of the pair of guide RNAs is a non-naturally occurring gRNA.

20. The system of any of claim 1-19, wherein the system is a cell-free system.

21. A cell comprising the system of any one of claims 1-19.

22. The cell of claim 21, wherein the cell is a eukaryotic cell.

23. The cell of claim 21 or 22, wherein the nucleic acid sequence for deletion is an endogenous nucleic acid.

24. The cell of any of claims 21-23, wherein the nucleic acid sequence for deletion is genomic DNA.

25. A method for deleting a nucleic acid sequence from a target nucleic acid, wherein the method comprises contacting the target nucleic acid with the system of any one of claims 1-19.

26. The method of claim 25, wherein the target nucleic acid is in a cell and contacting the target nucleic acid comprises introducing into the cell.

27. The method of claim 26, wherein the recombinase, or catalytic domain thereof, and/or one or more vectors encoding a recombinase, or catalytic domain thereof is introduced to the cell after the introduction of the engineered CRISPR-Cas system, the engineered transposon system, and the at least one donor nucleic acid.

28. The method of claim 26 or 27, wherein the introducing into the cell comprises administering to a subject.

29. The method of claim 28, wherein the administering comprises intravenous administration.

30. A method for inactivating a gene of interest, the method comprising introducing into one or more cells the system of any one of claims 1-19, wherein the nucleic acid sequence for deletion comprises at least a portion of the gene of interest.

31. The method of claim 30, wherein the one or more cells comprises microbial cells.

32. The method of claim 30, wherein the one or more cells comprises plant cells.

33. The method of claim 30, wherein the one or more cells comprises animal cells.

34. The method of any of claims 30-33, wherein the gene of interest comprises an antibiotic resistance gene, a virulence gene, or a metabolic gene.

35. Use of the system of any one of claims 1-19 for the deletion of a nucleic acid sequence from a target nucleic acid.

36. The use of claim 35, wherein the target nucleic acid sequence is in a cell.

37. The use of claim 36, wherein the cell comprises a eukaryotic cell.

38. The use of any of claims 35-37, wherein the nucleic acid sequence comprises at least a portion of a gene.

39. A method for genetically modifying diverse bacterial communities comprising:
contacting a recipient bacterial community with donor bacteria, the donor bacteria comprising a vector encoding:
an engineered Clustered Regularly Interspaced Short Palindromic Repeats (CRISPR)-CRISPR associated (Cas) (CRISPR-Cas) system, wherein the engineered CRISPR-Cas system comprises: (a) at least one Cas protein, and (b) at least one guide RNA (gRNA);
an engineered transposon system; and
at least one donor nucleic acid to be integrated comprising at least one transposon end sequence.

40. The method of claim 39, wherein the engineered CRISPR-Cas system comprises a Type V system or a Type I system.

41. The method of claim 39 or 40, wherein the engineered CRISPR-Cas system comprises Cas12k.

42. The method of any of claims 39-41, wherein the engineered CRISPR-Cas system comprises Cas5, Cas6, Cas7, Cas8, or a combination thereof.

43. The method of claim 42, wherein the engineered CRISPR-Cas system comprises a Cas8-Cas5 fusion protein.

44. The method of any of claims 39-43, wherein the engineered transposon system is derived from a Tn7 transposon system.

45. The method of any of claims 39-44, wherein the engineered transposon system comprises TnsA, TnsB, TnsC, or a combination thereof.

46. The method of any of claims 39-45, wherein the engineered transposon system comprises TniQ.

47. The system of any of claims 39-46, wherein the donor nucleic acid further comprises a cargo nucleic acid flanked by the at least one transposon end sequence.

48. The method of any of claims 39-47, wherein the vector further encodes a recombinase, or a catalytic domain thereof, and the at least one donor nucleic acid further comprises a recognition site for the recombinase.

49. The method of claim 48, wherein the cargo nucleic acid comprises the recognition site for the recombinase.

50. The method of claim 48 or 49, wherein the recombinase comprises Cre recombinase, a mutant, variant, or catalytic domain thereof and the recognition site comprises a lox site or variant thereof.

51. The method of any of claims 48-50, wherein the recombinase comprises flippase (FLP) recombinase, a mutant, variant, or catalytic domain thereof and the recognition site comprises a flippase recognition target (FRT) site or variant thereof.

52. The method of any of claims 48-51, wherein the recombinase, or catalytic domain thereof, comprises a serine recombinase.

53. The method of any of claims 48-52, wherein the recombinase comprises TniR resolvase, a mutant, variant, or catalytic domain thereof and the recognition site comprises a resolution (res) sequence or variant thereof.

54. The method of any of claims 48-53, wherein the recombinase comprises a Tn3-like resolvase, mutant, variant, or catalytic domain thereof and the recognition site comprises a resolution (res) sequence or variant thereof.

55. The method of any of claims 48-54, wherein the engineered CRISPR-Cas system comprises a pair of guide RNAs (gRNAs), wherein the pair of gRNAs is configured to hybridize to target sites flanking a nucleic acid sequence for deletion.

56. The method of claim 55, wherein the nucleic acid sequence for deletion comprises a genomic nucleic acid sequence endogenous to the recipient bacterial community.

57. The method of any of claims 39-56, wherein the engineered CRISPR-Cas system, the engineered transposon system, the recombinase, or a combination thereof are encoded within the at least one donor nucleic acid.

58. The method of any of claims 39-57, wherein the engineered CRISPR-Cas system, the engineered transposon system, the recombinase, or a combination thereof are encoded within the cargo nucleic acid.

59. The method of any of claims 39-58, wherein the recipient bacterial community is isolated from fecal matter.

60. The method of any of claims 39-59, wherein the recipient bacterial community comprises gut bacteria.

61. The method of any of claims 39-60, wherein the vector is a conjugative plasmid.

The application's sequence listing, which the Patent Office published only in electronic form, follows.

SEQUENCE LISTING (263 sequences)

SEQ ID NO: 1 - DNA, 8428 bp, artificial sequence
  Synthetic
attcaccaccctgaattgactctcttccgggcgctatcatgccataccgcgaaaggttttgcgccattcgatggtgtccgggatctcgacgctctcccttatgcgactcctgcattaggaaattaatacgactcactataggggaattgtgagcggataacaattcccctgtagaaataattttgtttaactttaataaggagatataccatgggtgaactgccgagtaggtagctgataacgagacctctggtctcgtgaactgccgagtaggtagctgataacggatccgaattcgagctcggcgcgcctgcaggtcgacaagcttgcggccgcataatgcttaagtcgaacagaaagtaatcgtattgtacacggccgcataatcgaaattaatacgactcactataggggaattgtgagcggataacaattccccatcttagtatattagttaagtataagaaggagatatacatatgtttttgcaaagacctaaaccttacagcgatgaaagtttagaaagtttctttatccgagtggctaacaaaaatggctacggtgatgtccatcgcttcctagaagccactaaacgattccttcaagacattgaccataatggctatcaaacctttccgactgatataactcggataaacccatactcagctaaaaacagttccagcgcacgaactgcgtcattcctgaaacttgcacaattgacatttaatgaaccgccagagctacttgggttggcaattaacagaacaaacatgaaatactcgccgtcaactagcgcggttgttagaggtgcagaagtctttcctcgcagtttactacggacgcactccatcccctgctgtcctttgtgtctgcgagaaaatggctacgcctcctacctttggcactttcaggggtacgaatactgccacagccataacgtacctttaattaccacttgtagctgtggtaaggagtttgactaccgagtatctgggttaaagggcatttgctgcaaatgcaaggagcctatcaccttaaccagcagggagaacggtcatgaggcagcgtgtactgtttcaaactggcttgctggccatgaatctaaacctctgccaaatcttcctaaaagctaccgatggggtttagttcattggtggatgggtattaaagatagcgagttcgatcacttttcgttcgttcaatttttctcaaactggccaaggtcattccactcgataatcgaagatgaagtagagttcaaccttgagcatgctgttgtcagcacgtctgaattacgactaaaagatcttcttggtcgattgtttttcggttcaattcggttacctgagcggaatcttcaacacaatatcatccttggtgagcttctctgctatttagaaaatcgtttatggcaagacaagggattaatcgccaacctcaaaatgaacgcgttagaggcgactgtaatgttaaattgtagcctcgatcagattgcatcaatggttgaacaacgcatcttgaagccaaatcgaaaaagcaagcccaacagccctcttgatgttaccgattatctatttcatttcggcgatattttctgtctttggttagctgagttccaaagcgatgagtttaaccgttcgttttatgtgtcgaggtggtaaatgcaaactctgaaagaactaatcgcatccaatcctgacgacttaacaactgaacttaagagagcatttcgtccactcacaccgcatattgcaattgatggtaatgaacttgacgcactgacgatattagtcaatttaaccgataagactgatgatcagaaagacctgctcgatcgagccaaatgcaagcaaaaacttcgagatgaaaaatggtgggctagctgcataaattgcgttaattacagacaaagccataacccaaaattcccggatatacgttctgaaggcgtgattcgaacccaagccctgggtgaattaccgagtttcctactctcgtcctcaaaaatcccaccataccattggtcatatagccatgattcaaaatacgtcaacaaaagcgcattcctcaccaatgagttttgttgggatggtgagatctcatgtttgggtgagcttcttaaagatgcagatcacccactttggaatactttgaaaaagttaggttgttctcaaaaaacttgcaaagcaatggcaaaacaactagctgatattactctcacgactatcaatgtcacactcgcaccaaattacctgactcaaatatctctccccgatagtgatacatcctacatttcactctctcctgttgcatcgctatcgatgcaaagccactttcatcagaggctccaagatgaaaatcggcatagcgcgataacgcggtttagccgaactaccaacatgggggtcactgcgatgacatgtggcggcgcatttagaatgttaaagtctggcgctaagttttccagcccccctcatcaccgattaaacagtaaacgaagttggttgacgtcagagcatgttcagtcattaaaacagtaccagcgcctcaacaaaagcctcatacctgaaaactctcggattgcactccgtagaaaatacaaaatcgagcttcaaaatatggtcagatcttggtttgcaatgcaagaccatacccttgattcgaacatacttatccaacatttgaatcatgacctatcttacttaggagccacaaaacgttttgcatacgatccagcgatgaccaagctctttactgagcttttgaaacgagagttatcaaattcaatcaataatggtgagcaacacactaatggatcgtttttagtcctaccgaatatcagggtttgtggcgcaacagctttaagctccccggtaacggtggggattccatcacttacagctttctttggcttcgttcacgcatttgaacggaatataaatcgcaccacctcatcgtttcgtgttgaatcctttgcgatatgcgtccatcaactacatgtcgagaagcgaggtttgacagcagagtttgtggaaaaaggcgacgggactatatccgctcccgcgacccgggatgactggcagtgtgatgtcgtatttagccttattttgaacaccaactttgctcaacatattgaccaagatacgttagttacatcactaccaaagcgattggctcggggttcagcaaaaattgcgattgatgactttaaacatatcaactcattctcgacattagaaacagcgatcgaatctctgccaatagaagctggtaggtggttatcactttacgcacagtcaaacaataatctaagtgatctattagcagccatgacagaggaccatcagctcatggcaagctgcgtcggttaccacttgttagaagagcccaaagataaaccaaactccctcagaggttacaaacacgctatcgccgagtgcatcattggactcattaactcaatcacctttagctcagagactgatcccaacacaatcttttggtcgctaaagaactatcaaaactacctagtggtacagccaaggagtatcaacgatgaaactaccgacaaatctagcctatgagcgctctatcgacccatcagatgtctgtttttttgtcgtctggcccgatgatagaaaaacacctttaacctacaattctcgtactctgctcgggcaaatggaagcggcatcattagcctatgatgtctcaggtcaaccaataaaaagtgccaccgctgaggcgttagctcaagggaaccctcatcaagttgatttctgccacgttccatacggtgcgagtcatattgaatgcagtttctccgtctcgttttcttctgaactacgtcaaccatataagtgtaactcaagcaaagttaaacaaacgctagtgcaattagtcgagctctacgaaacgaaaatcggctggactgagctagcaacccgatatttgatgaacatttgcaacggtaaatggctgtggaaaaatacccgtaaagcctattgctggaacattgtacttacaccttggccttggaacggggaaaaggttggatttgaagatattcgtactaactacacctcacggcaagactttaaaaataataaaaattggtctgctatagttgaaatgatcaaaaccgcattttctagtactgatgggctggcgatatttgaagtcagggccaccttgcacttgccaacgaatgctatggtgcggccaagccaagttttcacagaaaaagaaagtggcagtaaaagtaaatctaaaactcaaaacagtcgagtttttcagagtacaactattgatggtgaacgatcgccaatactaggggcctttaaaacgggagcagctattgcaaccattgacgactggtatcctgaagccactgagccactaagggtcggacggtttggggttcatcgcgaagatgtcacttgctaccgtcatccgtctaccggaaaagattttttctcgatattacaacaagcagagcactatattgaagtgttgagcgccaacaaaactcccgctcaagaaactatcaacgacatgcactttttaatggctaacctgattaagggtgggatgttccagcataaaggagactgactgtgaaatggtattataagacaatcacctttctgccagagttgtgcaacaacgagtcactggctgcaaagtgtctccgcgttctgcatggatttaactatcagtatgagacacgaaatatcggcgtttcatttccgctttggtgtgatgcaacggttggaaaaaagatttcatttgtcagcaagaacaagatagaactcgacttactacttaaacaacactatttcgtccaaatggaacaacttcaatactttcatatatccaacactgttctcgtcccagaagattgtacatacgtttcctttagacgctgtcaatctatagataagctcacagcagcagggctggcaaggaaaatcagacgcctggagaaacgtgctctatctagaggcgagcaatttgacccatcatcttttgctcaaaaagagcatactgcaatagcgcactaccactcacttggggagtccagcaaacagacgaaccgcaactttcgactcaatatcaggatgctctcggagcaaccccgtgaggggaactcgatttttagtagctatggcttatcaaattcagaaaactcgtttcagcctgtacccttaatctgacctaggctgctgccaccgctgagcaataactagcataaccccttggggcctctaaacgggtcttgaggggttttttgctgaaacctcaggcatttgagaagcacacggtcacactgcttccggtagtcaataaaccggtaaaccagcaatagacataagcggctatttaacgaccctgccctgaaccgacgaccgggtcatcgtggccggatcttgcggcccctcggcttgaacgaattgttagacattatttgccgactaccttggtgatctcgcctttcacgtagtggacaaattcttccaactgatctgcgcgcgaggccaagcgatcttcttcttgtccaagataagcctgtctagcttcaagtatgacgggctgatactgggccggcaggcgctccattgcccagtcggcagcgacatccttcggcgcgattttgccggttactgcgctgtaccaaatgcgggacaacgtaagcactacatttcgctcatcgccagcccagtcgggcggcgagttccatagcgttaaggtttcatttagcgcctcaaatagatcctgttcaggaaccggatcaaagagttcctccgccgctggacctaccaaggcaacgctatgttctcttgcttttgtcagcaagatagccagatcaatgtcgatcgtggctggctcgaagatacctgcaagaatgtcattgcgctgccattctccaaattgcagttcgcgcttagctggataacgccacggaatgatgtcgtcgtgcacaacaatggtgacttctacagcgcggagaatctcgctctctccaggggaagccgaagtttccaaaaggtcgttgatcaaagctcgccgcgttgtttcatcaagccttacggtcaccgtaaccagcaaatcaatatcactgtgtggcttcaggccgccatccactgcggagccgtacaaatgtacggccagcaacgtcggttcgagatggcgctcgatgacgccaactacctctgatagttgagtcgatacttcggcgatcaccgcttccctcatactcttcctttttcaatattattgaagcatttatcagggttattgtctcatgagcggatacatatttgaatgtatttagaaaaataaacaaatagctagctcactcggtcgctacgctccgggcgtgagactgcggcgggcgctgcggacacatacaaagttacccacagattccgtggataagcaggggactaacatgtgaggcaaaacagcagggccgcgccggtggcgtttttccataggctccgccctcctgccagagttcacataaacagacgcttttccggtgcatctgtgggagccgtgaggctcaaccatgaatctgacagtacgggcgaaacccgacaggacttaaagatccccaccgtttccggcgggtcgctccctcttgcgctctcctgttccgaccctgccgtttaccggatacctgttccgcctttctcccttacgggaagtgtggcgctttctcatagctcacacactggtatctcggctcggtgtaggtcgttcgctccaagctgggctgtaagcaagaactccccgttcagcccgactgctgcgccttatccggtaactgttcacttgagtccaacccggaaaagcacggtaaaacgccactggcagcagccattggtaactgggagttcgcagaggatttgtttagctaaacacgcggttgctcttgaagtgtgcgccaaagtccggctacactggaaggacagatttggttgctgtgctctgcgaaagccagttaccacggttaagcagttccccaactgacttaaccttcgatcaaaccacctccccaggtggttttttcgtttacagggcaaaagattacgcgcagaaaaaaaggatctcaagaagatcctttgatcttttctactgaaccgctctagatttcagtgcaatttatctcttcaaatgtagcacctgaagtcagccccatacgatataagttgtaattctcatgttagtcatgccccgcgcccaccggaaggagctgactgggttgaaggctctcaagggcatcggtcgagatcccggtgcctaatgagtgagctaacttacattaattgcgttgcgctcactgcccgctttccagtcgggaaacctgtcgtgccagctgcattaatgaatcggccaacgcgcggggagaggcggtttgcgtattgggcgccagggtggtttttcttttcaccagtgagacgggcaacagctgattgcccttcaccgcctggccctgagagagttgcagcaagcggtccacgctggtttgccccagcaggcgaaaatcctgtttgatggtggttaacggcgggatataacatgagctgtcttcggtatcgtcgtatcccactaccgagatgtccgcaccaacgcgcagcccggactcggtaatggcgcgcattgcgcccagcgccatctgatcgttggcaaccagcatcgcagtgggaacgatgccctcattcagcatttgcatggtttgttgaaaaccggacatggcactccagtcgccttcccgttccgctatcggctgaatttgattgcgagtgagatatttatgccagccagccagacgcagacgcgccgagacagaacttaatgggcccgctaacagcgcgatttgctggtgacccaatgcgaccagatgctccacgcccagtcgcgtaccgtcttcatgggagaaaataatactgttgatgggtgtctggtcagagacatcaagaaataacgccggaacattagtgcaggcagcttccacagcaatggcatcctggtcatccagcggatagttaatgatcagcccactgacgcgttgcgcgagaagattgtgcaccgccgctttacaggcttcgacgccgcttcgttctaccatcgacaccaccacgctggcacccagttgatcggcgcgagatttaatcgccgcgacaatttgcgacggcgcgtgcagggccagactggaggtggcaacgccaatcagcaacgactgtttgcccgccagttgttgtgccacgcggttgggaatgtaattcagctccgccatcgccgcttccactttttcccgcgttttcgcagaaacgtggctggcctggttcaccacgcgggaaacggtctgataagagacaccggcatactctgcgacatcgtataacgttactggtttcac

SEQ ID NO: 2 - DNA, 8445 bp, artificial sequence
  Synthetic
attcaccaccctgaattgactctcttccgggcgctatcatgccataccgcgaaaggttttgcgccattcgatggtgtccgggatctcgacgctctcccttatgcgactcctgcattaggaaattaatacgactcactataggggaattgtgagcggataacaattcccctgtagaaataattttgtttaactttaataaggagatataccatgggtgaactgccgagtaggtagctgataactgggaggattcataaagcattgtttgttggctgtgaactgccgagtaggtagctgataacggatccgaattcgagctcggcgcgcctgcaggtcgacaagcttgcggccgcataatgcttaagtcgaacagaaagtaatcgtattgtacacggccgcataatcgaaattaatacgactcactataggggaattgtgagcggataacaattccccatcttagtatattagttaagtataagaaggagatatacatatgtttttgcaaagacctaaaccttacagcgatgaaagtttagaaagtttctttatccgagtggctaacaaaaatggctacggtgatgtccatcgcttcctagaagccactaaacgattccttcaagacattgaccataatggctatcaaacctttccgactgatataactcggataaacccatactcagctaaaaacagttccagcgcacgaactgcgtcattcctgaaacttgcacaattgacatttaatgaaccgccagagctacttgggttggcaattaacagaacaaacatgaaatactcgccgtcaactagcgcggttgttagaggtgcagaagtctttcctcgcagtttactacggacgcactccatcccctgctgtcctttgtgtctgcgagaaaatggctacgcctcctacctttggcactttcaggggtacgaatactgccacagccataacgtacctttaattaccacttgtagctgtggtaaggagtttgactaccgagtatctgggttaaagggcatttgctgcaaatgcaaggagcctatcaccttaaccagcagggagaacggtcatgaggcagcgtgtactgtttcaaactggcttgctggccatgaatctaaacctctgccaaatcttcctaaaagctaccgatggggtttagttcattggtggatgggtattaaagatagcgagttcgatcacttttcgttcgttcaatttttctcaaactggccaaggtcattccactcgataatcgaagatgaagtagagttcaaccttgagcatgctgttgtcagcacgtctgaattacgactaaaagatcttcttggtcgattgtttttcggttcaattcggttacctgagcggaatcttcaacacaatatcatccttggtgagcttctctgctatttagaaaatcgtttatggcaagacaagggattaatcgccaacctcaaaatgaacgcgttagaggcgactgtaatgttaaattgtagcctcgatcagattgcatcaatggttgaacaacgcatcttgaagccaaatcgaaaaagcaagcccaacagccctcttgatgttaccgattatctatttcatttcggcgatattttctgtctttggttagctgagttccaaagcgatgagtttaaccgttcgttttatgtgtcgaggtggtaaatgcaaactctgaaagaactaatcgcatccaatcctgacgacttaacaactgaacttaagagagcatttcgtccactcacaccgcatattgcaattgatggtaatgaacttgacgcactgacgatattagtcaatttaaccgataagactgatgatcagaaagacctgctcgatcgagccaaatgcaagcaaaaacttcgagatgaaaaatggtgggctagctgcataaattgcgttaattacagacaaagccataacccaaaattcccggatatacgttctgaaggcgtgattcgaacccaagccctgggtgaattaccgagtttcctactctcgtcctcaaaaatcccaccataccattggtcatatagccatgattcaaaatacgtcaacaaaagcgcattcctcaccaatgagttttgttgggatggtgagatctcatgtttgggtgagcttcttaaagatgcagatcacccactttggaatactttgaaaaagttaggttgttctcaaaaaacttgcaaagcaatggcaaaacaactagctgatattactctcacgactatcaatgtcacactcgcaccaaattacctgactcaaatatctctccccgatagtgatacatcctacatttcactctctcctgttgcatcgctatcgatgcaaagccactttcatcagaggctccaagatgaaaatcggcatagcgcgataacgcggtttagccgaactaccaacatgggggtcactgcgatgacatgtggcggcgcatttagaatgttaaagtctggcgctaagttttccagcccccctcatcaccgattaaacagtaaacgaagttggttgacgtcagagcatgttcagtcattaaaacagtaccagcgcctcaacaaaagcctcatacctgaaaactctcggattgcactccgtagaaaatacaaaatcgagcttcaaaatatggtcagatcttggtttgcaatgcaagaccatacccttgattcgaacatacttatccaacatttgaatcatgacctatcttacttaggagccacaaaacgttttgcatacgatccagcgatgaccaagctctttactgagcttttgaaacgagagttatcaaattcaatcaataatggtgagcaacacactaatggatcgtttttagtcctaccgaatatcagggtttgtggcgcaacagctttaagctccccggtaacggtggggattccatcacttacagctttctttggcttcgttcacgcatttgaacggaatataaatcgcaccacctcatcgtttcgtgttgaatcctttgcgatatgcgtccatcaactacatgtcgagaagcgaggtttgacagcagagtttgtggaaaaaggcgacgggactatatccgctcccgcgacccgggatgactggcagtgtgatgtcgtatttagccttattttgaacaccaactttgctcaacatattgaccaagatacgttagttacatcactaccaaagcgattggctcggggttcagcaaaaattgcgattgatgactttaaacatatcaactcattctcgacattagaaacagcgatcgaatctctgccaatagaagctggtaggtggttatcactttacgcacagtcaaacaataatctaagtgatctattagcagccatgacagaggaccatcagctcatggcaagctgcgtcggttaccacttgttagaagagcccaaagataaaccaaactccctcagaggttacaaacacgctatcgccgagtgcatcattggactcattaactcaatcacctttagctcagagactgatcccaacacaatcttttggtcgctaaagaactatcaaaactacctagtggtacagccaaggagtatcaacgatgaaactaccgacaaatctagcctatgagcgctctatcgacccatcagatgtctgtttttttgtcgtctggcccgatgatagaaaaacacctttaacctacaattctcgtactctgctcgggcaaatggaagcggcatcattagcctatgatgtctcaggtcaaccaataaaaagtgccaccgctgaggcgttagctcaagggaaccctcatcaagttgatttctgccacgttccatacggtgcgagtcatattgaatgcagtttctccgtctcgttttcttctgaactacgtcaaccatataagtgtaactcaagcaaagttaaacaaacgctagtgcaattagtcgagctctacgaaacgaaaatcggctggactgagctagcaacccgatatttgatgaacatttgcaacggtaaatggctgtggaaaaatacccgtaaagcctattgctggaacattgtacttacaccttggccttggaacggggaaaaggttggatttgaagatattcgtactaactacacctcacggcaagactttaaaaataataaaaattggtctgctatagttgaaatgatcaaaaccgcattttctagtactgatgggctggcgatatttgaagtcagggccaccttgcacttgccaacgaatgctatggtgcggccaagccaagttttcacagaaaaagaaagtggcagtaaaagtaaatctaaaactcaaaacagtcgagtttttcagagtacaactattgatggtgaacgatcgccaatactaggggcctttaaaacgggagcagctattgcaaccattgacgactggtatcctgaagccactgagccactaagggtcggacggtttggggttcatcgcgaagatgtcacttgctaccgtcatccgtctaccggaaaagattttttctcgatattacaacaagcagagcactatattgaagtgttgagcgccaacaaaactcccgctcaagaaactatcaacgacatgcactttttaatggctaacctgattaagggtgggatgttccagcataaaggagactgactgtgaaatggtattataagacaatcacctttctgccagagttgtgcaacaacgagtcactggctgcaaagtgtctccgcgttctgcatggatttaactatcagtatgagacacgaaatatcggcgtttcatttccgctttggtgtgatgcaacggttggaaaaaagatttcatttgtcagcaagaacaagatagaactcgacttactacttaaacaacactatttcgtccaaatggaacaacttcaatactttcatatatccaacactgttctcgtcccagaagattgtacatacgtttcctttagacgctgtcaatctatagataagctcacagcagcagggctggcaaggaaaatcagacgcctggagaaacgtgctctatctagaggcgagcaatttgacccatcatcttttgctcaaaaagagcatactgcaatagcgcactaccactcacttggggagtccagcaaacagacgaaccgcaactttcgactcaatatcaggatgctctcggagcaaccccgtgaggggaactcgatttttagtagctatggcttatcaaattcagaaaactcgtttcagcctgtacccttaatctgacctaggctgctgccaccgctgagcaataactagcataaccccttggggcctctaaacgggtcttgaggggttttttgctgaaacctcaggcatttgagaagcacacggtcacactgcttccggtagtcaataaaccggtaaaccagcaatagacataagcggctatttaacgaccctgccctgaaccgacgaccgggtcatcgtggccggatcttgcggcccctcggcttgaacgaattgttagacattatttgccgactaccttggtgatctcgcctttcacgtagtggacaaattcttccaactgatctgcgcgcgaggccaagcgatcttcttcttgtccaagataagcctgtctagcttcaagtatgacgggctgatactgggccggcaggcgctccattgcccagtcggcagcgacatccttcggcgcgattttgccggttactgcgctgtaccaaatgcgggacaacgtaagcactacatttcgctcatcgccagcccagtcgggcggcgagttccatagcgttaaggtttcatttagcgcctcaaatagatcctgttcaggaaccggatcaaagagttcctccgccgctggacctaccaaggcaacgctatgttctcttgcttttgtcagcaagatagccagatcaatgtcgatcgtggctggctcgaagatacctgcaagaatgtcattgcgctgccattctccaaattgcagttcgcgcttagctggataacgccacggaatgatgtcgtcgtgcacaacaatggtgacttctacagcgcggagaatctcgctctctccaggggaagccgaagtttccaaaaggtcgttgatcaaagctcgccgcgttgtttcatcaagccttacggtcaccgtaaccagcaaatcaatatcactgtgtggcttcaggccgccatccactgcggagccgtacaaatgtacggccagcaacgtcggttcgagatggcgctcgatgacgccaactacctctgatagttgagtcgatacttcggcgatcaccgcttccctcatactcttcctttttcaatattattgaagcatttatcagggttattgtctcatgagcggatacatatttgaatgtatttagaaaaataaacaaatagctagctcactcggtcgctacgctccgggcgtgagactgcggcgggcgctgcggacacatacaaagttacccacagattccgtggataagcaggggactaacatgtgaggcaaaacagcagggccgcgccggtggcgtttttccataggctccgccctcctgccagagttcacataaacagacgcttttccggtgcatctgtgggagccgtgaggctcaaccatgaatctgacagtacgggcgaaacccgacaggacttaaagatccccaccgtttccggcgggtcgctccctcttgcgctctcctgttccgaccctgccgtttaccggatacctgttccgcctttctcccttacgggaagtgtggcgctttctcatagctcacacactggtatctcggctcggtgtaggtcgttcgctccaagctgggctgtaagcaagaactccccgttcagcccgactgctgcgccttatccggtaactgttcacttgagtccaacccggaaaagcacggtaaaacgccactggcagcagccattggtaactgggagttcgcagaggatttgtttagctaaacacgcggttgctcttgaagtgtgcgccaaagtccggctacactggaaggacagatttggttgctgtgctctgcgaaagccagttaccacggttaagcagttccccaactgacttaaccttcgatcaaaccacctccccaggtggttttttcgtttacagggcaaaagattacgcgcagaaaaaaaggatctcaagaagatcctttgatcttttctactgaaccgctctagatttcagtgcaatttatctcttcaaatgtagcacctgaagtcagccccatacgatataagttgtaattctcatgttagtcatgccccgcgcccaccggaaggagctgactgggttgaaggctctcaagggcatcggtcgagatcccggtgcctaatgagtgagctaacttacattaattgcgttgcgctcactgcccgctttccagtcgggaaacctgtcgtgccagctgcattaatgaatcggccaacgcgcggggagaggcggtttgcgtattgggcgccagggtggtttttcttttcaccagtgagacgggcaacagctgattgcccttcaccgcctggccctgagagagttgcagcaagcggtccacgctggtttgccccagcaggcgaaaatcctgtttgatggtggttaacggcgggatataacatgagctgtcttcggtatcgtcgtatcccactaccgagatgtccgcaccaacgcgcagcccggactcggtaatggcgcgcattgcgcccagcgccatctgatcgttggcaaccagcatcgcagtgggaacgatgccctcattcagcatttgcatggtttgttgaaaaccggacatggcactccagtcgccttcccgttccgctatcggctgaatttgattgcgagtgagatatttatgccagccagccagacgcagacgcgccgagacagaacttaatgggcccgctaacagcgcgatttgctggtgacccaatgcgaccagatgctccacgcccagtcgcgtaccgtcttcatgggagaaaataatactgttgatgggtgtctggtcagagacatcaagaaataacgccggaacattagtgcaggcagcttccacagcaatggcatcctggtcatccagcggatagttaatgatcagcccactgacgcgttgcgcgagaagattgtgcaccgccgctttacaggcttcgacgccgcttcgttctaccatcgacaccaccacgctggcacccagttgatcggcgcgagatttaatcgccgcgacaatttgcgacggcgcgtgcagggccagactggaggtggcaacgccaatcagcaacgactgtttgcccgccagttgttgtgccacgcggttgggaatgtaattcagctccgccatcgccgcttccactttttcccgcgttttcgcagaaacgtggctggcctggttcaccacgcgggaaacggtctgataagagacaccggcatactctgcgacatcgtataacgttactggtttcac

SEQ ID NO: 3 - DNA, 8445 bp, artificial sequence
  Synthetic
attcaccaccctgaattgactctcttccgggcgctatcatgccataccgcgaaaggttttgcgccattcgatggtgtccgggatctcgacgctctcccttatgcgactcctgcattaggaaattaatacgactcactataggggaattgtgagcggataacaattcccctgtagaaataattttgtttaactttaataaggagatataccatgggtgaactgccgagtaggtagctgataacgagaatattgtggcaaaagcgcataaggtgctgtgaactgccgagtaggtagctgataacggatccgaattcgagctcggcgcgcctgcaggtcgacaagcttgcggccgcataatgcttaagtcgaacagaaagtaatcgtattgtacacggccgcataatcgaaattaatacgactcactataggggaattgtgagcggataacaattccccatcttagtatattagttaagtataagaaggagatatacatatgtttttgcaaagacctaaaccttacagcgatgaaagtttagaaagtttctttatccgagtggctaacaaaaatggctacggtgatgtccatcgcttcctagaagccactaaacgattccttcaagacattgaccataatggctatcaaacctttccgactgatataactcggataaacccatactcagctaaaaacagttccagcgcacgaactgcgtcattcctgaaacttgcacaattgacatttaatgaaccgccagagctacttgggttggcaattaacagaacaaacatgaaatactcgccgtcaactagcgcggttgttagaggtgcagaagtctttcctcgcagtttactacggacgcactccatcccctgctgtcctttgtgtctgcgagaaaatggctacgcctcctacctttggcactttcaggggtacgaatactgccacagccataacgtacctttaattaccacttgtagctgtggtaaggagtttgactaccgagtatctgggttaaagggcatttgctgcaaatgcaaggagcctatcaccttaaccagcagggagaacggtcatgaggcagcgtgtactgtttcaaactggcttgctggccatgaatctaaacctctgccaaatcttcctaaaagctaccgatggggtttagttcattggtggatgggtattaaagatagcgagttcgatcacttttcgttcgttcaatttttctcaaactggccaaggtcattccactcgataatcgaagatgaagtagagttcaaccttgagcatgctgttgtcagcacgtctgaattacgactaaaagatcttcttggtcgattgtttttcggttcaattcggttacctgagcggaatcttcaacacaatatcatccttggtgagcttctctgctatttagaaaatcgtttatggcaagacaagggattaatcgccaacctcaaaatgaacgcgttagaggcgactgtaatgttaaattgtagcctcgatcagattgcatcaatggttgaacaacgcatcttgaagccaaatcgaaaaagcaagcccaacagccctcttgatgttaccgattatctatttcatttcggcgatattttctgtctttggttagctgagttccaaagcgatgagtttaaccgttcgttttatgtgtcgaggtggtaaatgcaaactctgaaagaactaatcgcatccaatcctgacgacttaacaactgaacttaagagagcatttcgtccactcacaccgcatattgcaattgatggtaatgaacttgacgcactgacgatattagtcaatttaaccgataagactgatgatcagaaagacctgctcgatcgagccaaatgcaagcaaaaacttcgagatgaaaaatggtgggctagctgcataaattgcgttaattacagacaaagccataacccaaaattcccggatatacgttctgaaggcgtgattcgaacccaagccctgggtgaattaccgagtttcctactctcgtcctcaaaaatcccaccataccattggtcatatagccatgattcaaaatacgtcaacaaaagcgcattcctcaccaatgagttttgttgggatggtgagatctcatgtttgggtgagcttcttaaagatgcagatcacccactttggaatactttgaaaaagttaggttgttctcaaaaaacttgcaaagcaatggcaaaacaactagctgatattactctcacgactatcaatgtcacactcgcaccaaattacctgactcaaatatctctccccgatagtgatacatcctacatttcactctctcctgttgcatcgctatcgatgcaaagccactttcatcagaggctccaagatgaaaatcggcatagcgcgataacgcggtttagccgaactaccaacatgggggtcactgcgatgacatgtggcggcgcatttagaatgttaaagtctggcgctaagttttccagcccccctcatcaccgattaaacagtaaacgaagttggttgacgtcagagcatgttcagtcattaaaacagtaccagcgcctcaacaaaagcctcatacctgaaaactctcggattgcactccgtagaaaatacaaaatcgagcttcaaaatatggtcagatcttggtttgcaatgcaagaccatacccttgattcgaacatacttatccaacatttgaatcatgacctatcttacttaggagccacaaaacgttttgcatacgatccagcgatgaccaagctctttactgagcttttgaaacgagagttatcaaattcaatcaataatggtgagcaacacactaatggatcgtttttagtcctaccgaatatcagggtttgtggcgcaacagctttaagctccccggtaacggtggggattccatcacttacagctttctttggcttcgttcacgcatttgaacggaatataaatcgcaccacctcatcgtttcgtgttgaatcctttgcgatatgcgtccatcaactacatgtcgagaagcgaggtttgacagcagagtttgtggaaaaaggcgacgggactatatccgctcccgcgacccgggatgactggcagtgtgatgtcgtatttagccttattttgaacaccaactttgctcaacatattgaccaagatacgttagttacatcactaccaaagcgattggctcggggttcagcaaaaattgcgattgatgactttaaacatatcaactcattctcgacattagaaacagcgatcgaatctctgccaatagaagctggtaggtggttatcactttacgcacagtcaaacaataatctaagtgatctattagcagccatgacagaggaccatcagctcatggcaagctgcgtcggttaccacttgttagaagagcccaaagataaaccaaactccctcagaggttacaaacacgctatcgccgagtgcatcattggactcattaactcaatcacctttagctcagagactgatcccaacacaatcttttggtcgctaaagaactatcaaaactacctagtggtacagccaaggagtatcaacgatgaaactaccgacaaatctagcctatgagcgctctatcgacccatcagatgtctgtttttttgtcgtctggcccgatgatagaaaaacacctttaacctacaattctcgtactctgctcgggcaaatggaagcggcatcattagcctatgatgtctcaggtcaaccaataaaaagtgccaccgctgaggcgttagctcaagggaaccctcatcaagttgatttctgccacgttccatacggtgcgagtcatattgaatgcagtttctccgtctcgttttcttctgaactacgtcaaccatataagtgtaactcaagcaaagttaaacaaacgctagtgcaattagtcgagctctacgaaacgaaaatcggctggactgagctagcaacccgatatttgatgaacatttgcaacggtaaatggctgtggaaaaatacccgtaaagcctattgctggaacattgtacttacaccttggccttggaacggggaaaaggttggatttgaagatattcgtactaactacacctcacggcaagactttaaaaataataaaaattggtctgctatagttgaaatgatcaaaaccgcattttctagtactgatgggctggcgatatttgaagtcagggccaccttgcacttgccaacgaatgctatggtgcggccaagccaagttttcacagaaaaagaaagtggcagtaaaagtaaatctaaaactcaaaacagtcgagtttttcagagtacaactattgatggtgaacgatcgccaatactaggggcctttaaaacgggagcagctattgcaaccattgacgactggtatcctgaagccactgagccactaagggtcggacggtttggggttcatcgcgaagatgtcacttgctaccgtcatccgtctaccggaaaagattttttctcgatattacaacaagcagagcactatattgaagtgttgagcgccaacaaaactcccgctcaagaaactatcaacgacatgcactttttaatggctaacctgattaagggtgggatgttccagcataaaggagactgactgtgaaatggtattataagacaatcacctttctgccagagttgtgcaacaacgagtcactggctgcaaagtgtctccgcgttctgcatggatttaactatcagtatgagacacgaaatatcggcgtttcatttccgctttggtgtgatgcaacggttggaaaaaagatttcatttgtcagcaagaacaagatagaactcgacttactacttaaacaacactatttcgtccaaatggaacaacttcaatactttcatatatccaacactgttctcgtcccagaagattgtacatacgtttcctttagacgctgtcaatctatagataagctcacagcagcagggctggcaaggaaaatcagacgcctggagaaacgtgctctatctagaggcgagcaatttgacccatcatcttttgctcaaaaagagcatactgcaatagcgcactaccactcacttggggagtccagcaaacagacgaaccgcaactttcgactcaatatcaggatgctctcggagcaaccccgtgaggggaactcgatttttagtagctatggcttatcaaattcagaaaactcgtttcagcctgtacccttaatctgacctaggctgctgccaccgctgagcaataactagcataaccccttggggcctctaaacgggtcttgaggggttttttgctgaaacctcaggcatttgagaagcacacggtcacactgcttccggtagtcaataaaccggtaaaccagcaatagacataagcggctatttaacgaccctgccctgaaccgacgaccgggtcatcgtggccggatcttgcggcccctcggcttgaacgaattgttagacattatttgccgactaccttggtgatctcgcctttcacgtagtggacaaattcttccaactgatctgcgcgcgaggccaagcgatcttcttcttgtccaagataagcctgtctagcttcaagtatgacgggctgatactgggccggcaggcgctccattgcccagtcggcagcgacatccttcggcgcgattttgccggttactgcgctgtaccaaatgcgggacaacgtaagcactacatttcgctcatcgccagcccagtcgggcggcgagttccatagcgttaaggtttcatttagcgcctcaaatagatcctgttcaggaaccggatcaaagagttcctccgccgctggacctaccaaggcaacgctatgttctcttgcttttgtcagcaagatagccagatcaatgtcgatcgtggctggctcgaagatacctgcaagaatgtcattgcgctgccattctccaaattgcagttcgcgcttagctggataacgccacggaatgatgtcgtcgtgcacaacaatggtgacttctacagcgcggagaatctcgctctctccaggggaagccgaagtttccaaaaggtcgttgatcaaagctcgccgcgttgtttcatcaagccttacggtcaccgtaaccagcaaatcaatatcactgtgtggcttcaggccgccatccactgcggagccgtacaaatgtacggccagcaacgtcggttcgagatggcgctcgatgacgccaactacctctgatagttgagtcgatacttcggcgatcaccgcttccctcatactcttcctttttcaatattattgaagcatttatcagggttattgtctcatgagcggatacatatttgaatgtatttagaaaaataaacaaatagctagctcactcggtcgctacgctccgggcgtgagactgcggcgggcgctgcggacacatacaaagttacccacagattccgtggataagcaggggactaacatgtgaggcaaaacagcagggccgcgccggtggcgtttttccataggctccgccctcctgccagagttcacataaacagacgcttttccggtgcatctgtgggagccgtgaggctcaaccatgaatctgacagtacgggcgaaacccgacaggacttaaagatccccaccgtttccggcgggtcgctccctcttgcgctctcctgttccgaccctgccgtttaccggatacctgttccgcctttctcccttacgggaagtgtggcgctttctcatagctcacacactggtatctcggctcggtgtaggtcgttcgctccaagctgggctgtaagcaagaactccccgttcagcccgactgctgcgccttatccggtaactgttcacttgagtccaacccggaaaagcacggtaaaacgccactggcagcagccattggtaactgggagttcgcagaggatttgtttagctaaacacgcggttgctcttgaagtgtgcgccaaagtccggctacactggaaggacagatttggttgctgtgctctgcgaaagccagttaccacggttaagcagttccccaactgacttaaccttcgatcaaaccacctccccaggtggttttttcgtttacagggcaaaagattacgcgcagaaaaaaaggatctcaagaagatcctttgatcttttctactgaaccgctctagatttcagtgcaatttatctcttcaaatgtagcacctgaagtcagccccatacgatataagttgtaattctcatgttagtcatgccccgcgcccaccggaaggagctgactgggttgaaggctctcaagggcatcggtcgagatcccggtgcctaatgagtgagctaacttacattaattgcgttgcgctcactgcccgctttccagtcgggaaacctgtcgtgccagctgcattaatgaatcggccaacgcgcggggagaggcggtttgcgtattgggcgccagggtggtttttcttttcaccagtgagacgggcaacagctgattgcccttcaccgcctggccctgagagagttgcagcaagcggtccacgctggtttgccccagcaggcgaaaatcctgtttgatggtggttaacggcgggatataacatgagctgtcttcggtatcgtcgtatcccactaccgagatgtccgcaccaacgcgcagcccggactcggtaatggcgcgcattgcgcccagcgccatctgatcgttggcaaccagcatcgcagtgggaacgatgccctcattcagcatttgcatggtttgttgaaaaccggacatggcactccagtcgccttcccgttccgctatcggctgaatttgattgcgagtgagatatttatgccagccagccagacgcagacgcgccgagacagaacttaatgggcccgctaacagcgcgatttgctggtgacccaatgcgaccagatgctccacgcccagtcgcgtaccgtcttcatgggagaaaataatactgttgatgggtgtctggtcagagacatcaagaaataacgccggaacattagtgcaggcagcttccacagcaatggcatcctggtcatccagcggatagttaatgatcagcccactgacgcgttgcgcgagaagattgtgcaccgccgctttacaggcttcgacgccgcttcgttctaccatcgacaccaccacgctggcacccagttgatcggcgcgagatttaatcgccgcgacaatttgcgacggcgcgtgcagggccagactggaggtggcaacgccaatcagcaacgactgtttgcccgccagttgttgtgccacgcggttgggaatgtaattcagctccgccatcgccgcttccactttttcccgcgttttcgcagaaacgtggctggcctggttcaccacgcgggaaacggtctgataagagacaccggcatactctgcgacatcgtataacgttactggtttcac

SEQ ID NO: 4 - DNA, 8445 bp, artificial sequence
  Synthetic
attcaccaccctgaattgactctcttccgggcgctatcatgccataccgcgaaaggttttgcgccattcgatggtgtccgggatctcgacgctctcccttatgcgactcctgcattaggaaattaatacgactcactataggggaattgtgagcggataacaattcccctgtagaaataattttgtttaactttaataaggagatataccatgggtgaactgccgagtaggtagctgataactcttgctgagattgataaggtaattaaccttagtgaactgccgagtaggtagctgataacggatccgaattcgagctcggcgcgcctgcaggtcgacaagcttgcggccgcataatgcttaagtcgaacagaaagtaatcgtattgtacacggccgcataatcgaaattaatacgactcactataggggaattgtgagcggataacaattccccatcttagtatattagttaagtataagaaggagatatacatatgtttttgcaaagacctaaaccttacagcgatgaaagtttagaaagtttctttatccgagtggctaacaaaaatggctacggtgatgtccatcgcttcctagaagccactaaacgattccttcaagacattgaccataatggctatcaaacctttccgactgatataactcggataaacccatactcagctaaaaacagttccagcgcacgaactgcgtcattcctgaaacttgcacaattgacatttaatgaaccgccagagctacttgggttggcaattaacagaacaaacatgaaatactcgccgtcaactagcgcggttgttagaggtgcagaagtctttcctcgcagtttactacggacgcactccatcccctgctgtcctttgtgtctgcgagaaaatggctacgcctcctacctttggcactttcaggggtacgaatactgccacagccataacgtacctttaattaccacttgtagctgtggtaaggagtttgactaccgagtatctgggttaaagggcatttgctgcaaatgcaaggagcctatcaccttaaccagcagggagaacggtcatgaggcagcgtgtactgtttcaaactggcttgctggccatgaatctaaacctctgccaaatcttcctaaaagctaccgatggggtttagttcattggtggatgggtattaaagatagcgagttcgatcacttttcgttcgttcaatttttctcaaactggccaaggtcattccactcgataatcgaagatgaagtagagttcaaccttgagcatgctgttgtcagcacgtctgaattacgactaaaagatcttcttggtcgattgtttttcggttcaattcggttacctgagcggaatcttcaacacaatatcatccttggtgagcttctctgctatttagaaaatcgtttatggcaagacaagggattaatcgccaacctcaaaatgaacgcgttagaggcgactgtaatgttaaattgtagcctcgatcagattgcatcaatggttgaacaacgcatcttgaagccaaatcgaaaaagcaagcccaacagccctcttgatgttaccgattatctatttcatttcggcgatattttctgtctttggttagctgagttccaaagcgatgagtttaaccgttcgttttatgtgtcgaggtggtaaatgcaaactctgaaagaactaatcgcatccaatcctgacgacttaacaactgaacttaagagagcatttcgtccactcacaccgcatattgcaattgatggtaatgaacttgacgcactgacgatattagtcaatttaaccgataagactgatgatcagaaagacctgctcgatcgagccaaatgcaagcaaaaacttcgagatgaaaaatggtgggctagctgcataaattgcgttaattacagacaaagccataacccaaaattcccggatatacgttctgaaggcgtgattcgaacccaagccctgggtgaattaccgagtttcctactctcgtcctcaaaaatcccaccataccattggtcatatagccatgattcaaaatacgtcaacaaaagcgcattcctcaccaatgagttttgttgggatggtgagatctcatgtttgggtgagcttcttaaagatgcagatcacccactttggaatactttgaaaaagttaggttgttctcaaaaaacttgcaaagcaatggcaaaacaactagctgatattactctcacgactatcaatgtcacactcgcaccaaattacctgactcaaatatctctccccgatagtgatacatcctacatttcactctctcctgttgcatcgctatcgatgcaaagccactttcatcagaggctccaagatgaaaatcggcatagcgcgataacgcggtttagccgaactaccaacatgggggtcactgcgatgacatgtggcggcgcatttagaatgttaaagtctggcgctaagttttccagcccccctcatcaccgattaaacagtaaacgaagttggttgacgtcagagcatgttcagtcattaaaacagtaccagcgcctcaacaaaagcctcatacctgaaaactctcggattgcactccgtagaaaatacaaaatcgagcttcaaaatatggtcagatcttggtttgcaatgcaagaccatacccttgattcgaacatacttatccaacatttgaatcatgacctatcttacttaggagccacaaaacgttttgcatacgatccagcgatgaccaagctctttactgagcttttgaaacgagagttatcaaattcaatcaataatggtgagcaacacactaatggatcgtttttagtcctaccgaatatcagggtttgtggcgcaacagctttaagctccccggtaacggtggggattccatcacttacagctttctttggcttcgttcacgcatttgaacggaatataaatcgcaccacctcatcgtttcgtgttgaatcctttgcgatatgcgtccatcaactacatgtcgagaagcgaggtttgacagcagagtttgtggaaaaaggcgacgggactatatccgctcccgcgacccgggatgactggcagtgtgatgtcgtatttagccttattttgaacaccaactttgctcaacatattgaccaagatacgttagttacatcactaccaaagcgattggctcggggttcagcaaaaattgcgattgatgactttaaacatatcaactcattctcgacattagaaacagcgatcgaatctctgccaatagaagctggtaggtggttatcactttacgcacagtcaaacaataatctaagtgatctattagcagccatgacagaggaccatcagctcatggcaagctgcgtcggttaccacttgttagaagagcccaaagataaaccaaactccctcagaggttacaaacacgctatcgccgagtgcatcattggactcattaactcaatcacctttagctcagagactgatcccaacacaatcttttggtcgctaaagaactatcaaaactacctagtggtacagccaaggagtatcaacgatgaaactaccgacaaatctagcctatgagcgctctatcgacccatcagatgtctgtttttttgtcgtctggcccgatgatagaaaaacacctttaacctacaattctcgtactctgctcgggcaaatggaagcggcatcattagcctatgatgtctcaggtcaaccaataaaaagtgccaccgctgaggcgttagctcaagggaaccctcatcaagttgatttctgccacgttccatacggtgcgagtcatattgaatgcagtttctccgtctcgttttcttctgaactacgtcaaccatataagtgtaactcaagcaaagttaaacaaacgctagtgcaattagtcgagctctacgaaacgaaaatcggctggactgagctagcaacccgatatttgatgaacatttgcaacggtaaatggctgtggaaaaatacccgtaaagcctattgctggaacattgtacttacaccttggccttggaacggggaaaaggttggatttgaagatattcgtactaactacacctcacggcaagactttaaaaataataaaaattggtctgctatagttgaaatgatcaaaaccgcattttctagtactgatgggctggcgatatttgaagtcagggccaccttgcacttgccaacgaatgctatggtgcggccaagccaagttttcacagaaaaagaaagtggcagtaaaagtaaatctaaaactcaaaacagtcgagtttttcagagtacaactattgatggtgaacgatcgccaatactaggggcctttaaaacgggagcagctattgcaaccattgacgactggtatcctgaagccactgagccactaagggtcggacggtttggggttcatcgcgaagatgtcacttgctaccgtcatccgtctaccggaaaagattttttctcgatattacaacaagcagagcactatattgaagtgttgagcgccaacaaaactcccgctcaagaaactatcaacgacatgcactttttaatggctaacctgattaagggtgggatgttccagcataaaggagactgactgtgaaatggtattataagacaatcacctttctgccagagttgtgcaacaacgagtcactggctgcaaagtgtctccgcgttctgcatggatttaactatcagtatgagacacgaaatatcggcgtttcatttccgctttggtgtgatgcaacggttggaaaaaagatttcatttgtcagcaagaacaagatagaactcgacttactacttaaacaacactatttcgtccaaatggaacaacttcaatactttcatatatccaacactgttctcgtcccagaagattgtacatacgtttcctttagacgctgtcaatctatagataagctcacagcagcagggctggcaaggaaaatcagacgcctggagaaacgtgctctatctagaggcgagcaatttgacccatcatcttttgctcaaaaagagcatactgcaatagcgcactaccactcacttggggagtccagcaaacagacgaaccgcaactttcgactcaatatcaggatgctctcggagcaaccccgtgaggggaactcgatttttagtagctatggcttatcaaattcagaaaactcgtttcagcctgtacccttaatctgacctaggctgctgccaccgctgagcaataactagcataaccccttggggcctctaaacgggtcttgaggggttttttgctgaaacctcaggcatttgagaagcacacggtcacactgcttccggtagtcaataaaccggtaaaccagcaatagacataagcggctatttaacgaccctgccctgaaccgacgaccgggtcatcgtggccggatcttgcggcccctcggcttgaacgaattgttagacattatttgccgactaccttggtgatctcgcctttcacgtagtggacaaattcttccaactgatctgcgcgcgaggccaagcgatcttcttcttgtccaagataagcctgtctagcttcaagtatgacgggctgatactgggccggcaggcgctccattgcccagtcggcagcgacatccttcggcgcgattttgccggttactgcgctgtaccaaatgcgggacaacgtaagcactacatttcgctcatcgccagcccagtcgggcggcgagttccatagcgttaaggtttcatttagcgcctcaaatagatcctgttcaggaaccggatcaaagagttcctccgccgctggacctaccaaggcaacgctatgttctcttgcttttgtcagcaagatagccagatcaatgtcgatcgtggctggctcgaagatacctgcaagaatgtcattgcgctgccattctccaaattgcagttcgcgcttagctggataacgccacggaatgatgtcgtcgtgcacaacaatggtgacttctacagcgcggagaatctcgctctctccaggggaagccgaagtttccaaaaggtcgttgatcaaagctcgccgcgttgtttcatcaagccttacggtcaccgtaaccagcaaatcaatatcactgtgtggcttcaggccgccatccactgcggagccgtacaaatgtacggccagcaacgtcggttcgagatggcgctcgatgacgccaactacctctgatagttgagtcgatacttcggcgatcaccgcttccctcatactcttcctttttcaatattattgaagcatttatcagggttattgtctcatgagcggatacatatttgaatgtatttagaaaaataaacaaatagctagctcactcggtcgctacgctccgggcgtgagactgcggcgggcgctgcggacacatacaaagttacccacagattccgtggataagcaggggactaacatgtgaggcaaaacagcagggccgcgccggtggcgtttttccataggctccgccctcctgccagagttcacataaacagacgcttttccggtgcatctgtgggagccgtgaggctcaaccatgaatctgacagtacgggcgaaacccgacaggacttaaagatccccaccgtttccggcgggtcgctccctcttgcgctctcctgttccgaccctgccgtttaccggatacctgttccgcctttctcccttacgggaagtgtggcgctttctcatagctcacacactggtatctcggctcggtgtaggtcgttcgctccaagctgggctgtaagcaagaactccccgttcagcccgactgctgcgccttatccggtaactgttcacttgagtccaacccggaaaagcacggtaaaacgccactggcagcagccattggtaactgggagttcgcagaggatttgtttagctaaacacgcggttgctcttgaagtgtgcgccaaagtccggctacactggaaggacagatttggttgctgtgctctgcgaaagccagttaccacggttaagcagttccccaactgacttaaccttcgatcaaaccacctccccaggtggttttttcgtttacagggcaaaagattacgcgcagaaaaaaaggatctcaagaagatcctttgatcttttctactgaaccgctctagatttcagtgcaatttatctcttcaaatgtagcacctgaagtcagccccatacgatataagttgtaattctcatgttagtcatgccccgcgcccaccggaaggagctgactgggttgaaggctctcaagggcatcggtcgagatcccggtgcctaatgagtgagctaacttacattaattgcgttgcgctcactgcccgctttccagtcgggaaacctgtcgtgccagctgcattaatgaatcggccaacgcgcggggagaggcggtttgcgtattgggcgccagggtggtttttcttttcaccagtgagacgggcaacagctgattgcccttcaccgcctggccctgagagagttgcagcaagcggtccacgctggtttgccccagcaggcgaaaatcctgtttgatggtggttaacggcgggatataacatgagctgtcttcggtatcgtcgtatcccactaccgagatgtccgcaccaacgcgcagcccggactcggtaatggcgcgcattgcgcccagcgccatctgatcgttggcaaccagcatcgcagtgggaacgatgccctcattcagcatttgcatggtttgttgaaaaccggacatggcactccagtcgccttcccgttccgctatcggctgaatttgattgcgagtgagatatttatgccagccagccagacgcagacgcgccgagacagaacttaatgggcccgctaacagcgcgatttgctggtgacccaatgcgaccagatgctccacgcccagtcgcgtaccgtcttcatgggagaaaataatactgttgatgggtgtctggtcagagacatcaagaaataacgccggaacattagtgcaggcagcttccacagcaatggcatcctggtcatccagcggatagttaatgatcagcccactgacgcgttgcgcgagaagattgtgcaccgccgctttacaggcttcgacgccgcttcgttctaccatcgacaccaccacgctggcacccagttgatcggcgcgagatttaatcgccgcgacaatttgcgacggcgcgtgcagggccagactggaggtggcaacgccaatcagcaacgactgtttgcccgccagttgttgtgccacgcggttgggaatgtaattcagctccgccatcgccgcttccactttttcccgcgttttcgcagaaacgtggctggcctggttcaccacgcgggaaacggtctgataagagacaccggcatactctgcgacatcgtataacgttactggtttcac

SEQ ID NO: 5 - DNA, 8445 bp, artificial sequence
  Synthetic
attcaccaccctgaattgactctcttccgggcgctatcatgccataccgcgaaaggttttgcgccattcgatggtgtccgggatctcgacgctctcccttatgcgactcctgcattaggaaattaatacgactcactataggggaattgtgagcggataacaattcccctgtagaaataattttgtttaactttaataaggagatataccatgggtgaactgccgagtaggtagctgataacgcattactaagctggcgcgtgaagctgtagaagtgaactgccgagtaggtagctgataacggatccgaattcgagctcggcgcgcctgcaggtcgacaagcttgcggccgcataatgcttaagtcgaacagaaagtaatcgtattgtacacggccgcataatcgaaattaatacgactcactataggggaattgtgagcggataacaattccccatcttagtatattagttaagtataagaaggagatatacatatgtttttgcaaagacctaaaccttacagcgatgaaagtttagaaagtttctttatccgagtggctaacaaaaatggctacggtgatgtccatcgcttcctagaagccactaaacgattccttcaagacattgaccataatggctatcaaacctttccgactgatataactcggataaacccatactcagctaaaaacagttccagcgcacgaactgcgtcattcctgaaacttgcacaattgacatttaatgaaccgccagagctacttgggttggcaattaacagaacaaacatgaaatactcgccgtcaactagcgcggttgttagaggtgcagaagtctttcctcgcagtttactacggacgcactccatcccctgctgtcctttgtgtctgcgagaaaatggctacgcctcctacctttggcactttcaggggtacgaatactgccacagccataacgtacctttaattaccacttgtagctgtggtaaggagtttgactaccgagtatctgggttaaagggcatttgctgcaaatgcaaggagcctatcaccttaaccagcagggagaacggtcatgaggcagcgtgtactgtttcaaactggcttgctggccatgaatctaaacctctgccaaatcttcctaaaagctaccgatggggtttagttcattggtggatgggtattaaagatagcgagttcgatcacttttcgttcgttcaatttttctcaaactggccaaggtcattccactcgataatcgaagatgaagtagagttcaaccttgagcatgctgttgtcagcacgtctgaattacgactaaaagatcttcttggtcgattgtttttcggttcaattcggttacctgagcggaatcttcaacacaatatcatccttggtgagcttctctgctatttagaaaatcgtttatggcaagacaagggattaatcgccaacctcaaaatgaacgcgttagaggcgactgtaatgttaaattgtagcctcgatcagattgcatcaatggttgaacaacgcatcttgaagccaaatcgaaaaagcaagcccaacagccctcttgatgttaccgattatctatttcatttcggcgatattttctgtctttggttagctgagttccaaagcgatgagtttaaccgttcgttttatgtgtcgaggtggtaaatgcaaactctgaaagaactaatcgcatccaatcctgacgacttaacaactgaacttaagagagcatttcgtccactcacaccgcatattgcaattgatggtaatgaacttgacgcactgacgatattagtcaatttaaccgataagactgatgatcagaaagacctgctcgatcgagccaaatgcaagcaaaaacttcgagatgaaaaatggtgggctagctgcataaattgcgttaattacagacaaagccataacccaaaattcccggatatacgttctgaaggcgtgattcgaacccaagccctgggtgaattaccgagtttcctactctcgtcctcaaaaatcccaccataccattggtcatatagccatgattcaaaatacgtcaacaaaagcgcattcctcaccaatgagttttgttgggatggtgagatctcatgtttgggtgagcttcttaaagatgcagatcacccactttggaatactttgaaaaagttaggttgttctcaaaaaacttgcaaagcaatggcaaaacaactagctgatattactctcacgactatcaatgtcacactcgcaccaaattacctgactcaaatatctctccccgatagtgatacatcctacatttcactctctcctgttgcatcgctatcgatgcaaagccactttcatcagaggctccaagatgaaaatcggcatagcgcgataacgcggtttagccgaactaccaacatgggggtcactgcgatgacatgtggcggcgcatttagaatgttaaagtctggcgctaagttttccagcccccctcatcaccgattaaacagtaaacgaagttggttgacgtcagagcatgttcagtcattaaaacagtaccagcgcctcaacaaaagcctcatacctgaaaactctcggattgcactccgtagaaaatacaaaatcgagcttcaaaatatggtcagatcttggtttgcaatgcaagaccatacccttgattcgaacatacttatccaacatttgaatcatgacctatcttacttaggagccacaaaacgttttgcatacgatccagcgatgaccaagctctttactgagcttttgaaacgagagttatcaaattcaatcaataatggtgagcaacacactaatggatcgtttttagtcctaccgaatatcagggtttgtggcgcaacagctttaagctccccggtaacggtggggattccatcacttacagctttctttggcttcgttcacgcatttgaacggaatataaatcgcaccacctcatcgtttcgtgttgaatcctttgcgatatgcgtccatcaactacatgtcgagaagcgaggtttgacagcagagtttgtggaaaaaggcgacgggactatatccgctcccgcgacccgggatgactggcagtgtgatgtcgtatttagccttattttgaacaccaactttgctcaacatattgaccaagatacgttagttacatcactaccaaagcgattggctcggggttcagcaaaaattgcgattgatgactttaaacatatcaactcattctcgacattagaaacagcgatcgaatctctgccaatagaagctggtaggtggttatcactttacgcacagtcaaacaataatctaagtgatctattagcagccatgacagaggaccatcagctcatggcaagctgcgtcggttaccacttgttagaagagcccaaagataaaccaaactccctcagaggttacaaacacgctatcgccgagtgcatcattggactcattaactcaatcacctttagctcagagactgatcccaacacaatcttttggtcgctaaagaactatcaaaactacctagtggtacagccaaggagtatcaacgatgaaactaccgacaaatctagcctatgagcgctctatcgacccatcagatgtctgtttttttgtcgtctggcccgatgatagaaaaacacctttaacctacaattctcgtactctgctcgggcaaatggaagcggcatcattagcctatgatgtctcaggtcaaccaataaaaagtgccaccgctgaggcgttagctcaagggaaccctcatcaagttgatttctgccacgttccatacggtgcgagtcatattgaatgcagtttctccgtctcgttttcttctgaactacgtcaaccatataagtgtaactcaagcaaagttaaacaaacgctagtgcaattagtcgagctctacgaaacgaaaatcggctggactgagctagcaacccgatatttgatgaacatttgcaacggtaaatggctgtggaaaaatacccgtaaagcctattgctggaacattgtacttacaccttggccttggaacggggaaaaggttggatttgaagatattcgtactaactacacctcacggcaagactttaaaaataataaaaattggtctgctatagttgaaatgatcaaaaccgcattttctagtactgatgggctggcgatatttgaagtcagggccaccttgcacttgccaacgaatgctatggtgcggccaagccaagttttcacagaaaaagaaagtggcagtaaaagtaaatctaaaactcaaaacagtcgagtttttcagagtacaactattgatggtgaacgatcgccaatactaggggcctttaaaacgggagcagctattgcaaccattgacgactggtatcctgaagccactgagccactaagggtcggacggtttggggttcatcgcgaagatgtcacttgctaccgtcatccgtctaccggaaaagattttttctcgatattacaacaagcagagcactatattgaagtgttgagcgccaacaaaactcccgctcaagaaactatcaacgacatgcactttttaatggctaacctgattaagggtgggatgttccagcataaaggagactgactgtgaaatggtattataagacaatcacctttctgccagagttgtgcaacaacgagtcactggctgcaaagtgtctccgcgttctgcatggatttaactatcagtatgagacacgaaatatcggcgtttcatttccgctttggtgtgatgcaacggttggaaaaaagatttcatttgtcagcaagaacaagatagaactcgacttactacttaaacaacactatttcgtccaaatggaacaacttcaatactttcatatatccaacactgttctcgtcccagaagattgtacatacgtttcctttagacgctgtcaatctatagataagctcacagcagcagggctggcaaggaaaatcagacgcctggagaaacgtgctctatctagaggcgagcaatttgacccatcatcttttgctcaaaaagagcatactgcaatagcgcactaccactcacttggggagtccagcaaacagacgaaccgcaactttcgactcaatatcaggatgctctcggagcaaccccgtgaggggaactcgatttttagtagctatggcttatcaaattcagaaaactcgtttcagcctgtacccttaatctgacctaggctgctgccaccgctgagcaataactagcataaccccttggggcctctaaacgggtcttgaggggttttttgctgaaacctcaggcatttgagaagcacacggtcacactgcttccggtagtcaataaaccggtaaaccagcaatagacataagcggctatttaacgaccctgccctgaaccgacgaccgggtcatcgtggccggatcttgcggcccctcggcttgaacgaattgttagacattatttgccgactaccttggtgatctcgcctttcacgtagtggacaaattcttccaactgatctgcgcgcgaggccaagcgatcttcttcttgtccaagataagcctgtctagcttcaagtatgacgggctgatactgggccggcaggcgctccattgcccagtcggcagcgacatccttcggcgcgattttgccggttactgcgctgtaccaaatgcgggacaacgtaagcactacatttcgctcatcgccagcccagtcgggcggcgagttccatagcgttaaggtttcatttagcgcctcaaatagatcctgttcaggaaccggatcaaagagttcctccgccgctggacctaccaaggcaacgctatgttctcttgcttttgtcagcaagatagccagatcaatgtcgatcgtggctggctcgaagatacctgcaagaatgtcattgcgctgccattctccaaattgcagttcgcgcttagctggataacgccacggaatgatgtcgtcgtgcacaacaatggtgacttctacagcgcggagaatctcgctctctccaggggaagccgaagtttccaaaaggtcgttgatcaaagctcgccgcgttgtttcatcaagccttacggtcaccgtaaccagcaaatcaatatcactgtgtggcttcaggccgccatccactgcggagccgtacaaatgtacggccagcaacgtcggttcgagatggcgctcgatgacgccaactacctctgatagttgagtcgatacttcggcgatcaccgcttccctcatactcttcctttttcaatattattgaagcatttatcagggttattgtctcatgagcggatacatatttgaatgtatttagaaaaataaacaaatagctagctcactcggtcgctacgctccgggcgtgagactgcggcgggcgctgcggacacatacaaagttacccacagattccgtggataagcaggggactaacatgtgaggcaaaacagcagggccgcgccggtggcgtttttccataggctccgccctcctgccagagttcacataaacagacgcttttccggtgcatctgtgggagccgtgaggctcaaccatgaatctgacagtacgggcgaaacccgacaggacttaaagatccccaccgtttccggcgggtcgctccctcttgcgctctcctgttccgaccctgccgtttaccggatacctgttccgcctttctcccttacgggaagtgtggcgctttctcatagctcacacactggtatctcggctcggtgtaggtcgttcgctccaagctgggctgtaagcaagaactccccgttcagcccgactgctgcgccttatccggtaactgttcacttgagtccaacccggaaaagcacggtaaaacgccactggcagcagccattggtaactgggagttcgcagaggatttgtttagctaaacacgcggttgctcttgaagtgtgcgccaaagtccggctacactggaaggacagatttggttgctgtgctctgcgaaagccagttaccacggttaagcagttccccaactgacttaaccttcgatcaaaccacctccccaggtggttttttcgtttacagggcaaaagattacgcgcagaaaaaaaggatctcaagaagatcctttgatcttttctactgaaccgctctagatttcagtgcaatttatctcttcaaatgtagcacctgaagtcagccccatacgatataagttgtaattctcatgttagtcatgccccgcgcccaccggaaggagctgactgggttgaaggctctcaagggcatcggtcgagatcccggtgcctaatgagtgagctaacttacattaattgcgttgcgctcactgcccgctttccagtcgggaaacctgtcgtgccagctgcattaatgaatcggccaacgcgcggggagaggcggtttgcgtattgggcgccagggtggtttttcttttcaccagtgagacgggcaacagctgattgcccttcaccgcctggccctgagagagttgcagcaagcggtccacgctggtttgccccagcaggcgaaaatcctgtttgatggtggttaacggcgggatataacatgagctgtcttcggtatcgtcgtatcccactaccgagatgtccgcaccaacgcgcagcccggactcggtaatggcgcgcattgcgcccagcgccatctgatcgttggcaaccagcatcgcagtgggaacgatgccctcattcagcatttgcatggtttgttgaaaaccggacatggcactccagtcgccttcccgttccgctatcggctgaatttgattgcgagtgagatatttatgccagccagccagacgcagacgcgccgagacagaacttaatgggcccgctaacagcgcgatttgctggtgacccaatgcgaccagatgctccacgcccagtcgcgtaccgtcttcatgggagaaaataatactgttgatgggtgtctggtcagagacatcaagaaataacgccggaacattagtgcaggcagcttccacagcaatggcatcctggtcatccagcggatagttaatgatcagcccactgacgcgttgcgcgagaagattgtgcaccgccgctttacaggcttcgacgccgcttcgttctaccatcgacaccaccacgctggcacccagttgatcggcgcgagatttaatcgccgcgacaatttgcgacggcgcgtgcagggccagactggaggtggcaacgccaatcagcaacgactgtttgcccgccagttgttgtgccacgcggttgggaatgtaattcagctccgccatcgccgcttccactttttcccgcgttttcgcagaaacgtggctggcctggttcaccacgcgggaaacggtctgataagagacaccggcatactctgcgacatcgtataacgttactggtttcac

SEQ ID NO: 6 - DNA, 8445 bp, artificial sequence
  Synthetic
attcaccaccctgaattgactctcttccgggcgctatcatgccataccgcgaaaggttttgcgccattcgatggtgtccgggatctcgacgctctcccttatgcgactcctgcattaggaaattaatacgactcactataggggaattgtgagcggataacaattcccctgtagaaataattttgtttaactttaataaggagatataccatgggtgaactgccgagtaggtagctgataacagtacagcgcggctgaaatcatcattaaagcggtgaactgccgagtaggtagctgataacggatccgaattcgagctcggcgcgcctgcaggtcgacaagcttgcggccgcataatgcttaagtcgaacagaaagtaatcgtattgtacacggccgcataatcgaaattaatacgactcactataggggaattgtgagcggataacaattccccatcttagtatattagttaagtataagaaggagatatacatatgtttttgcaaagacctaaaccttacagcgatgaaagtttagaaagtttctttatccgagtggctaacaaaaatggctacggtgatgtccatcgcttcctagaagccactaaacgattccttcaagacattgaccataatggctatcaaacctttccgactgatataactcggataaacccatactcagctaaaaacagttccagcgcacgaactgcgtcattcctgaaacttgcacaattgacatttaatgaaccgccagagctacttgggttggcaattaacagaacaaacatgaaatactcgccgtcaactagcgcggttgttagaggtgcagaagtctttcctcgcagtttactacggacgcactccatcccctgctgtcctttgtgtctgcgagaaaatggctacgcctcctacctttggcactttcaggggtacgaatactgccacagccataacgtacctttaattaccacttgtagctgtggtaaggagtttgactaccgagtatctgggttaaagggcatttgctgcaaatgcaaggagcctatcaccttaaccagcagggagaacggtcatgaggcagcgtgtactgtttcaaactggcttgctggccatgaatctaaacctctgccaaatcttcctaaaagctaccgatggggtttagttcattggtggatgggtattaaagatagcgagttcgatcacttttcgttcgttcaatttttctcaaactggccaaggtcattccactcgataatcgaagatgaagtagagttcaaccttgagcatgctgttgtcagcacgtctgaattacgactaaaagatcttcttggtcgattgtttttcggttcaattcggttacctgagcggaatcttcaacacaatatcatccttggtgagcttctctgctatttagaaaatcgtttatggcaagacaagggattaatcgccaacctcaaaatgaacgcgttagaggcgactgtaatgttaaattgtagcctcgatcagattgcatcaatggttgaacaacgcatcttgaagccaaatcgaaaaagcaagcccaacagccctcttgatgttaccgattatctatttcatttcggcgatattttctgtctttggttagctgagttccaaagcgatgagtttaaccgttcgttttatgtgtcgaggtggtaaatgcaaactctgaaagaactaatcgcatccaatcctgacgacttaacaactgaacttaagagagcatttcgtccactcacaccgcatattgcaattgatggtaatgaacttgacgcactgacgatattagtcaatttaaccgataagactgatgatcagaaagacctgctcgatcgagccaaatgcaagcaaaaacttcgagatgaaaaatggtgggctagctgcataaattgcgttaattacagacaaagccataacccaaaattcccggatatacgttctgaaggcgtgattcgaacccaagccctgggtgaattaccgagtttcctactctcgtcctcaaaaatcccaccataccattggtcatatagccatgattcaaaatacgtcaacaaaagcgcattcctcaccaatgagttttgttgggatggtgagatctcatgtttgggtgagcttcttaaagatgcagatcacccactttggaatactttgaaaaagttaggttgttctcaaaaaacttgcaaagcaatggcaaaacaactagctgatattactctcacgactatcaatgtcacactcgcaccaaattacctgactcaaatatctctccccgatagtgatacatcctacatttcactctctcctgttgcatcgctatcgatgcaaagccactttcatcagaggctccaagatgaaaatcggcatagcgcgataacgcggtttagccgaactaccaacatgggggtcactgcgatgacatgtggcggcgcatttagaatgttaaagtctggcgctaagttttccagcccccctcatcaccgattaaacagtaaacgaagttggttgacgtcagagcatgttcagtcattaaaacagtaccagcgcctcaacaaaagcctcatacctgaaaactctcggattgcactccgtagaaaatacaaaatcgagcttcaaaatatggtcagatcttggtttgcaatgcaagaccatacccttgattcgaacatacttatccaacatttgaatcatgacctatcttacttaggagccacaaaacgttttgcatacgatccagcgatgaccaagctctttactgagcttttgaaacgagagttatcaaattcaatcaataatggtgagcaacacactaatggatcgtttttagtcctaccgaatatcagggtttgtggcgcaacagctttaagctccccggtaacggtggggattccatcacttacagctttctttggcttcgttcacgcatttgaacggaatataaatcgcaccacctcatcgtttcgtgttgaatcctttgcgatatgcgtccatcaactacatgtcgagaagcgaggtttgacagcagagtttgtggaaaaaggcgacgggactatatccgctcccgcgacccgggatgactggcagtgtgatgtcgtatttagccttattttgaacaccaactttgctcaacatattgaccaagatacgttagttacatcactaccaaagcgattggctcggggttcagcaaaaattgcgattgatgactttaaacatatcaactcattctcgacattagaaacagcgatcgaatctctgccaatagaagctggtaggtggttatcactttacgcacagtcaaacaataatctaagtgatctattagcagccatgacagaggaccatcagctcatggcaagctgcgtcggttaccacttgttagaagagcccaaagataaaccaaactccctcagaggttacaaacacgctatcgccgagtgcatcattggactcattaactcaatcacctttagctcagagactgatcccaacacaatcttttggtcgctaaagaactatcaaaactacctagtggtacagccaaggagtatcaacgatgaaactaccgacaaatctagcctatgagcgctctatcgacccatcagatgtctgtttttttgtcgtctggcccgatgatagaaaaacacctttaacctacaattctcgtactctgctcgggcaaatggaagcggcatcattagcctatgatgtctcaggtcaaccaataaaaagtgccaccgctgaggcgttagctcaagggaaccctcatcaagttgatttctgccacgttccatacggtgcgagtcatattgaatgcagtttctccgtctcgttttcttctgaactacgtcaaccatataagtgtaactcaagcaaagttaaacaaacgctagtgcaattagtcgagctctacgaaacgaaaatcggctggactgagctagcaacccgatatttgatgaacatttgcaacggtaaatggctgtggaaaaatacccgtaaagcctattgctggaacattgtacttacaccttggccttggaacggggaaaaggttggatttgaagatattcgtactaactacacctcacggcaagactttaaaaataataaaaattggtctgctatagttgaaatgatcaaaaccgcattttctagtactgatgggctggcgatatttgaagtcagggccaccttgcacttgccaacgaatgctatggtgcggccaagccaagttttcacagaaaaagaaagtggcagtaaaagtaaatctaaaactcaaaacagtcgagtttttcagagtacaactattgatggtgaacgatcgccaatactaggggcctttaaaacgggagcagctattgcaaccattgacgactggtatcctgaagccactgagccactaagggtcggacggtttggggttcatcgcgaagatgtcacttgctaccgtcatccgtctaccggaaaagattttttctcgatattacaacaagcagagcactatattgaagtgttgagcgccaacaaaactcccgctcaagaaactatcaacgacatgcactttttaatggctaacctgattaagggtgggatgttccagcataaaggagactgactgtgaaatggtattataagacaatcacctttctgccagagttgtgcaacaacgagtcactggctgcaaagtgtctccgcgttctgcatggatttaactatcagtatgagacacgaaatatcggcgtttcatttccgctttggtgtgatgcaacggttggaaaaaagatttcatttgtcagcaagaacaagatagaactcgacttactacttaaacaacactatttcgtccaaatggaacaacttcaatactttcatatatccaacactgttctcgtcccagaagattgtacatacgtttcctttagacgctgtcaatctatagataagctcacagcagcagggctggcaaggaaaatcagacgcctggagaaacgtgctctatctagaggcgagcaatttgacccatcatcttttgctcaaaaagagcatactgcaatagcgcactaccactcacttggggagtccagcaaacagacgaaccgcaactttcgactcaatatcaggatgctctcggagcaaccccgtgaggggaactcgatttttagtagctatggcttatcaaattcagaaaactcgtttcagcctgtacccttaatctgacctaggctgctgccaccgctgagcaataactagcataaccccttggggcctctaaacgggtcttgaggggttttttgctgaaacctcaggcatttgagaagcacacggtcacactgcttccggtagtcaataaaccggtaaaccagcaatagacataagcggctatttaacgaccctgccctgaaccgacgaccgggtcatcgtggccggatcttgcggcccctcggcttgaacgaattgttagacattatttgccgactaccttggtgatctcgcctttcacgtagtggacaaattcttccaactgatctgcgcgcgaggccaagcgatcttcttcttgtccaagataagcctgtctagcttcaagtatgacgggctgatactgggccggcaggcgctccattgcccagtcggcagcgacatccttcggcgcgattttgccggttactgcgctgtaccaaatgcgggacaacgtaagcactacatttcgctcatcgccagcccagtcgggcggcgagttccatagcgttaaggtttcatttagcgcctcaaatagatcctgttcaggaaccggatcaaagagttcctccgccgctggacctaccaaggcaacgctatgttctcttgcttttgtcagcaagatagccagatcaatgtcgatcgtggctggctcgaagatacctgcaagaatgtcattgcgctgccattctccaaattgcagttcgcgcttagctggataacgccacggaatgatgtcgtcgtgcacaacaatggtgacttctacagcgcggagaatctcgctctctccaggggaagccgaagtttccaaaaggtcgttgatcaaagctcgccgcgttgtttcatcaagccttacggtcaccgtaaccagcaaatcaatatcactgtgtggcttcaggccgccatccactgcggagccgtacaaatgtacggccagcaacgtcggttcgagatggcgctcgatgacgccaactacctctgatagttgagtcgatacttcggcgatcaccgcttccctcatactcttcctttttcaatattattgaagcatttatcagggttattgtctcatgagcggatacatatttgaatgtatttagaaaaataaacaaatagctagctcactcggtcgctacgctccgggcgtgagactgcggcgggcgctgcggacacatacaaagttacccacagattccgtggataagcaggggactaacatgtgaggcaaaacagcagggccgcgccggtggcgtttttccataggctccgccctcctgccagagttcacataaacagacgcttttccggtgcatctgtgggagccgtgaggctcaaccatgaatctgacagtacgggcgaaacccgacaggacttaaagatccccaccgtttccggcgggtcgctccctcttgcgctctcctgttccgaccctgccgtttaccggatacctgttccgcctttctcccttacgggaagtgtggcgctttctcatagctcacacactggtatctcggctcggtgtaggtcgttcgctccaagctgggctgtaagcaagaactccccgttcagcccgactgctgcgccttatccggtaactgttcacttgagtccaacccggaaaagcacggtaaaacgccactggcagcagccattggtaactgggagttcgcagaggatttgtttagctaaacacgcggttgctcttgaagtgtgcgccaaagtccggctacactggaaggacagatttggttgctgtgctctgcgaaagccagttaccacggttaagcagttccccaactgacttaaccttcgatcaaaccacctccccaggtggttttttcgtttacagggcaaaagattacgcgcagaaaaaaaggatctcaagaagatcctttgatcttttctactgaaccgctctagatttcagtgcaatttatctcttcaaatgtagcacctgaagtcagccccatacgatataagttgtaattctcatgttagtcatgccccgcgcccaccggaaggagctgactgggttgaaggctctcaagggcatcggtcgagatcccggtgcctaatgagtgagctaacttacattaattgcgttgcgctcactgcccgctttccagtcgggaaacctgtcgtgccagctgcattaatgaatcggccaacgcgcggggagaggcggtttgcgtattgggcgccagggtggtttttcttttcaccagtgagacgggcaacagctgattgcccttcaccgcctggccctgagagagttgcagcaagcggtccacgctggtttgccccagcaggcgaaaatcctgtttgatggtggttaacggcgggatataacatgagctgtcttcggtatcgtcgtatcccactaccgagatgtccgcaccaacgcgcagcccggactcggtaatggcgcgcattgcgcccagcgccatctgatcgttggcaaccagcatcgcagtgggaacgatgccctcattcagcatttgcatggtttgttgaaaaccggacatggcactccagtcgccttcccgttccgctatcggctgaatttgattgcgagtgagatatttatgccagccagccagacgcagacgcgccgagacagaacttaatgggcccgctaacagcgcgatttgctggtgacccaatgcgaccagatgctccacgcccagtcgcgtaccgtcttcatgggagaaaataatactgttgatgggtgtctggtcagagacatcaagaaataacgccggaacattagtgcaggcagcttccacagcaatggcatcctggtcatccagcggatagttaatgatcagcccactgacgcgttgcgcgagaagattgtgcaccgccgctttacaggcttcgacgccgcttcgttctaccatcgacaccaccacgctggcacccagttgatcggcgcgagatttaatcgccgcgacaatttgcgacggcgcgtgcagggccagactggaggtggcaacgccaatcagcaacgactgtttgcccgccagttgttgtgccacgcggttgggaatgtaattcagctccgccatcgccgcttccactttttcccgcgttttcgcagaaacgtggctggcctggttcaccacgcgggaaacggtctgataagagacaccggcatactctgcgacatcgtataacgttactggtttcac

SEQ ID NO: 7 - DNA, 6858 bp, artificial sequence
  Synthetic
ttcagtgcaatttatctcttcaaatgtagcacctgaagtcagccccatacgatataagttgtaattctcatgttagtcatgccccgcgcccaccggaaggagctgactgggttgaaggctctcaagggcatcggtcgagatcccggtgcctaatgagtgagctaacttacattaattgcgttgcgctcactgcccgctttccagtcgggaaacctgtcgtgccagctgcattaatgaatcggccaacgcgcggggagaggcggtttgcgtattgggcgccagggtggtttttcttttcaccagtgagacgggcaacagctgattgcccttcaccgcctggccctgagagagttgcagcaagcggtccacgctggtttgccccagcaggcgaaaatcctgtttgatggtggttaacggcgggatataacatgagctgtcttcggtatcgtcgtatcccactaccgagatgtccgcaccaacgcgcagcccggactcggtaatggcgcgcattgcgcccagcgccatctgatcgttggcaaccagcatcgcagtgggaacgatgccctcattcagcatttgcatggtttgttgaaaaccggacatggcactccagtcgccttcccgttccgctatcggctgaatttgattgcgagtgagatatttatgccagccagccagacgcagacgcgccgagacagaacttaatgggcccgctaacagcgcgatttgctggtgacccaatgcgaccagatgctccacgcccagtcgcgtaccgtcttcatgggagaaaataatactgttgatgggtgtctggtcagagacatcaagaaataacgccggaacattagtgcaggcagcttccacagcaatggcatcctggtcatccagcggatagttaatgatcagcccactgacgcgttgcgcgagaagattgtgcaccgccgctttacaggcttcgacgccgcttcgttctaccatcgacaccaccacgctggcacccagttgatcggcgcgagatttaatcgccgcgacaatttgcgacggcgcgtgcagggccagactggaggtggcaacgccaatcagcaacgactgtttgcccgccagttgttgtgccacgcggttgggaatgtaattcagctccgccatcgccgcttccactttttcccgcgttttcgcagaaacgtggctggcctggttcaccacgcgggaaacggtctgataagagacaccggcatactctgcgacatcgtataacgttactggtttcacattcaccaccctgaattgactctcttccgggcgctatcatgccataccgcgaaaggttttgcgccattcgatggtgtccgggatctcgacgctctcccttatgcgactcctgcattaggaaattaatacgactcactataggggaattgtgagcggataacaattcccctgtagaaataattttgtttaactttaataaggagatataccatggcgacaagtttacctacgccctcagcaattacgacttcggcgttagagtatgcattccatactcccgctcgcaatctaacgaaatctcgcggaaaaaacattcatcgttatgtcagtgtaaagatgagtaagaggattacggtagaatctactctagagtgtgatgcctgctatcactttgattttgagccaagtattgttcgcttttgcgctcaaccgattcgatttttatattatctcaatggtcagtctcactcctatgttcctgactttctagttcaatttgataccaacgagtttgttctatatgaagtaaagtcagcttatgctaagaacaaacctgattttgatgttgaatgggaggcgaaagtaaaagcagcaactgaactagggctagaattggagcttgttgaagagagtgatattagggatacggttgtattaaataatcttaagcgcatgcatcgttatgcttcgaaagatgagctgaataacgtacataactctctcttaaaaataataaagtacaatggcgcccaatctgcaagatgcttgggagaacagttgggtttaaaaggccgaactgttttaccaattttgtgcgatttgctgtcaaggtgtttactcgatacacgtttggataagcctctatctcttgaatctcgatttgagttggccagttatggctaagaaagggttctcaagtttccatagaaaagcagtctcttcccaagatacgcttgaatcgatagagcttgtctctagcgctaattgtctagaaagtgttacgtatcaagatatatcagcatttcccgaaacaattgcggtagagattaatttccgattaagcattcttcgctttttagcgcgaaagtgcgaaaccattgtggccaaatcaattgaaccacatcgtgtagagctacagcaaaactatagtagaaaaatacccagtgcaataacgatatatcgatggtggcttgcttttcgaaaatcagactacaaccccattagcttagcacctaatatcaaggatagaggtaatagagagacaaaagtgtcaacagttgttgattctattatggaacaggcagttgaaagagttatatctggacgaaaagtcaatgttagctctgcatataaacgtgttcgacgaaaagttcgtcaatacaatctaactcatggaacgaaatacacgtatcctaagtacgaatctgtaagaaagcgagtaaaaaagaaaaccccatttgagttattagccgcagggaaaggggagagagtagctaagagagagtttcgccgaatgggaaaaaagatcctcacgtctagcgtgctagagagggttgaaatagatcacactgtcgttgacctttttgcagtacacgaagagtatcgaatcccattgggccgaccttggcttactcaattggttgattgttacagtaaagctgtaatcggtttttatttaggtttcgagcctcctagctatgtgtcggtttcccttgcacttaagaatgcaatacaacgcaaagatgacttaatctcctcgtatgaatcgatcgagaatgaatggctatgttatggcatcccagacctactcgtaactgataatggtaaagagtttttgtcgaaagcatttgatcaagcatgtgaatcactattgatcaatgtgcatcaaaataaagttgagacgcccgacaacaaacctcatgttgaacgtaactacgggactattaatacttctctgttagacgatttacctgggaaatccttcagccagtaccttcaaagagaagggtacgactctgtgggagaagctacccttacactcaatgagattagagaaatttacttaatttggttggtggatatttatcataaaaaacccaatcagagaggcactaattgtcctaatgttgcgtggaaaaagggttgtcaagaatgggaaccagaggagttctctggttctaaagacgaattagactttaaatttgctattgttgattacaaacaacttactaaagtagggataactgtctacaaagaactgagttatagcaatgaccgtttagctgaatatagagggaagaaaggaaaccataaagttcagttcaagtataaccctgagtgtatggcagttatttgggtgttggatgaggatatgaatgagtactttacagttaatgcgattgactacgaatatgcaagtagagtatcactttggcaacataaatataacatgaaatatcaagcagaactaaattcagcagaatatgatgaggacaaggaaattgatgcagaaataaaaattgaagaaatcgcagatcgttcaattgttaagactaacaaaatcagagctcggaggcgtggcgctaggcatcaagagaatagcgcaagggctaagtcaatcagtaatgcgaacccggcctcgatacaaaaacatgaagatgaaatcgttagtgcagataatgacgattgggatattgattatgtctgagaaatcgtcaaatgagtgaaacgcgtgaggctcgtatatcaagagctaaaagggcatttgtatccacaccgagcgttaggaaaatcttgagttacatggatagatgtagagatctatcagacctagagtctgagcctacatgcatgatggtctatggtgcttcgggtgtaggtaaaacgaccgtcatcaagaaatacttaaatcaaaacagaagagagtccgaagccgggggcgatataataccggttttgcatattgagttgccagacaatgcgaagccagtagatgcagcaagggaattgctggttgaaatgggtgacccgctagcactttatgaaactgacttagctagattgacgaaaagactgactgaattaatccctgcggtcggcgtgaagctgattattatcgatgagttccaacatttggtggaagaaaggtcaaatcgggttcttacccaagtaggtaattggctaaaaatgatacttaacaaaacgaaatgtccaattgttatatttggtatgccatactcaaaagttgtactgcaagcaaactcgcaacttcacgggcgattttccattcaggttgaactgcgcccctttagctaccagggaggtagaggtgtatttaaaacttttttggaataccttgataaagccctaccttttgaaaaacaggctggcttagccaacgaaagtttgcagaaaaaattgtatgcattctctcagggaaacatgcgttcgttgagaaaccttatttatcaagcatctatcgaagcaattgataatcagcatgagacgataaccgaagaagatttcgtttttgcatcgaagttgacatcgggcgataaacccaactcatggaaaaatccttttgaggagggtgttgaggtaacagaagatatgttacgaccgccaccaaaagatattggttgggaggactatttgagacattcaaccccgagagtgagtaaaccaggtagaaataaaaactttttcgaataacctaggctgctgccaccgctgagcaataactagcataaccccttggggcctctaaacgggtcttgaggggttttttgctgaaacctcaggcatttgagaagcacacggtcacactgcttccggtagtcaataaaccggtaaaccagcaatagacataagcggctatttaacgaccctgccctgaaccgacgacaagctgacgaccgggtctccgcaagtggcacttttcggggaaatgtgcgcggaacccctatttgtttatttttctaaatacattcaaatatgtatccgctcatgaattaattcttagaaaaactcatcgagcatcaaatgaaactgcaatttattcatatcaggattatcaataccatatttttgaaaaagccgtttctgtaatgaaggagaaaactcaccgaggcagttccataggatggcaagatcctggtatcggtctgcgattccgactcgtccaacatcaatacaacctattaatttcccctcgtcaaaaataaggttatcaagtgagaaatcaccatgagtgacgactgaatccggtgagaatggcaaaagtttatgcatttctttccagacttgttcaacaggccagccattacgctcgtcatcaaaatcactcgcatcaaccaaaccgttattcattcgtgattgcgcctgagcgagacgaaatacgcggtcgctgttaaaaggacaattacaaacaggaatcgaatgcaaccggcgcaggaacactgccagcgcatcaacaatattttcacctgaatcaggatattcttctaatacctggaatgctgttttcccggggatcgcagtggtgagtaaccatgcatcatcaggagtacggataaaatgcttgatggtcggaagaggcataaattccgtcagccagtttagtctgaccatctcatctgtaacatcattggcaacgctacctttgccatgtttcagaaacaactctggcgcatcgggcttcccatacaatcgatagattgtcgcacctgattgcccgacattatcgcgagcccatttatacccatataaatcagcatccatgttggaatttaatcgcggcctagagcaagacgtttcccgttgaatatggctcatactcttcctttttcaatattattgaagcatttatcagggttattgtctcatgagcggatacatatttgaatgtatttagaaaaataaacaaataggcatgctagcgcagaaacgtcctagaagatgccaggaggatacttagcagagagacaataaggccggagcgaagccgtttttccataggctccgcccccctgacgaacatcacgaaatctgacgctcaaatcagtggtggcgaaacccgacaggactataaagataccaggcgtttccccctgatggctccctcttgcgctctcctgttcccgtcctgcggcgtccgtgttgtggtggaggctttacccaaatcaccacgtcccgttccgtgtagacagttcgctccaagctgggctgtgtgcaagaaccccccgttcagcccgactgctgcgccttatccggtaactatcatcttgagtccaacccggaaagacacgacaaaacgccactggcagcagccattggtaactgagaattagtggatttagatatcgagagtcttgaagtggtggcctaacagaggctacactgaaaggacagtatttggtatctgcgctccactaaagccagttaccaggttaagcagttccccaactgacttaaccttcgatcaaaccgcctccccaggcggttttttcgtttacagagcaggagattacgacgatcgtaaaaggatctcaagaagatcctttacggattcccgacaccatcactctagat

SEQ ID NO: 8 - DNA, 3630 bp, artificial sequence
  Synthetic
gttcctggccttttgctggccttttgctcacatgttctttcctgcgttatcccctgattctgtggataaccgtattaccgcctttgagtgagctgataccgctcgccgcagccgaacgaccgagcgcagcgagtcagtgagcgaggaagcggaagagcgcccaatacgcaaaccgcctctccccgcgcgttggccgattcattaatgcagctggcacgacaggtttcccgactggaaagcgggcagtgagcgcaacgcaattaatgtgagttagctcactcattaggcaccccaggctttacactttatgcttccggctcgtatgttgtgtggaattgtgagcggataacaatttcacacaggaaacagctatgaccatgattacgccaagctttgttgatacaaccataaaatgataattacacccataaattgataattatcacacccataaattgatattgcctcttcatggtctaaacttcagtaagtttacgacattttcatgaagaggtcatttccggggatccatggagaaaaaaatcactggatataccaccgttgatatatcccaatggcatcgtaaagaacattttgaggcatttcagtcagttgctcaatgtacctataaccagaccgttcagctggatattacggcctttttaaagaccgtaaagaaaaataagcacaagttttatccggcctttattcacattcttgcccgcctgatgaatgctcatccggagttccgtatggcaatgaaagacggtgagctggtgatatgggatagtgttcacccttgttacaccgttttccatgagcaaactgaaacgttttcatcgctctggagtgaataccacgacgatttccggcagtttctacacatatattcgcaagatgtggcgtgttacggtgaaaacctggcctatttccctaaagggtttattgagaatatgtttttcgtctcagccaatccctgggtgagtttcaccagttttgatttaaacgtggccaatatggacaacttcttcgcccccgttttcactatgggcaaatattatacgcaaggcgacaaggtgctgatgccgctggcgattcaggttcatcatgccgtttgtgatggcttccatgtcggcagaatgcttaatgaattacaacagtactgcgatgagtggcagggcggggcgtaatttttttaaggcagttattggtgcccttctagagtccttactgcagtagttttgctgaaatactcgattcacaaaaatatcaacttatggttgttttgtgagatatcaatatatggttgttttgtggttaagttgctgattataaataattattaaatatcactttatggttgcatcaacaggtaccgagctcgaattcactggccgtcgttttacaacgtcgtgactgggaaaaccctggcgttacccaacttaatcgccttgcagcacatccccctttcgccagctggcgtaatagcgaagaggcccgcaccgatcgcccttcccaacagttgcgcagcctgaatggcgaatggcgcctgatgcggtattttctccttacgcatctgtgcggtatttcacaccgcatatggtgcactctcagtacaatctgctctgatgccgcatagttaagccagccccgacacccgccaacacccgctgacgcgccctgacgggcttgtctgctcccggcatccgcttacagacaagctgtgaccgtctccgggagctgcatgtgtcagaggttttcaccgtcatcaccgaaacgcgcgagacgaaagggcctcgtgatacgcctatttttataggttaatgtcatgataataatggtttcttagacgtcaggtggcacttttcggggaaatgtgcgcggaacccctatttgtttatttttctaaatacattcaaatatgtatccgctcatgagacaataaccctgataaatgcttcaataatattgaaaaaggaagagtatgagtattcaacatttccgtgtcgcccttattcccttttttgcggcattttgccttcctgtttttgctcacccagaaacgctggtgaaagtaaaagatgctgaagatcagttgggtgcacgagtgggttacatcgaactggatctcaacagcggtaagatccttgagagttttcgccccgaagaacgttttccaatgatgagcacttttaaagttctgctatgtggcgcggtattatcccgtattgacgccgggcaagagcaactcggtcgccgcatacactattctcagaatgacttggttgagtactcaccagtcacagaaaagcatcttacggatggcatgacagtaagagaattatgcagtgctgccataaccatgagtgataacactgcggccaacttacttctgacaacgatcggaggaccgaaggagctaaccgcttttttgcacaacatgggggatcatgtaactcgccttgatcgttgggaaccggagctgaatgaagccataccaaacgacgagcgtgacaccacgatgcctgtagcaatggcaacaacgttgcgcaaactattaactggcgaactacttactctagcttcccggcaacaattaatagactggatggaggcggataaagttgcaggaccacttctgcgctcggcccttccggctggctggtttattgctgataaatctggagccggtgagcgtgggtctcgcggtatcattgcagcactggggccagatggtaagccctcccgtatcgtagttatctacacgacggggagtcaggcaactatggatgaacgaaatagacagatcgctgagataggtgcctcactgattaagcattggtaactgtcagaccaagtttactcatatatactttagattgatttaaaacttcatttttaatttaaaaggatctaggtgaagatcctttttgataatctcatgaccaaaatcccttaacgtgagttttcgttccactgagcgtcagaccccgtagaaaagatcaaaggatcttcttgagatcctttttttctgcgcgtaatctgctgcttgcaaacaaaaaaaccaccgctaccagcggtggtttgtttgccggatcaagagctaccaactctttttccgaaggtaactggcttcagcagagcgcagataccaaatactgttcttctagtgtagccgtagttaggccaccacttcaagaactctgtagcaccgcctacatacctcgctctgctaatcctgttaccagtggctgctgccagtggcgataagtcgtgtcttaccgggttggactcaagacgatagttaccggataaggcgcagcggtcgggctgaacggggggttcgtgcacacagcccagcttggagcgaacgacctacaccgaactgagatacctacagcgtgagctatgagaaagcgccacgcttcccgaagggagaaaggcggacaggtatccggtaagcggcagggtcggaacaggagagcgcacgagggagcttccagggggaaacgcctggtatctttatagtcctgtcgggtttcgccacctctgacttgagcgtcgatttttgtgatgctcgtcaggggggcggagcctatggaaaaacgccagcaacgcggcctttttacg

SEQ ID NO: 9 - DNA, 8282 bp, artificial sequence
  Synthetic
attcaccaccctgaattgactctcttccgggcgctatcatgccataccgcgaaaggttttgcgccattcgatggtgtccgggatctcgacgctctcccttatgcgactcctgcattaggaaattaatacgactcactataggggaattgtgagcggataacaattcccctgtagaaataattttgtttaactttaataaggagatataccatgggtgaactgccgagtaggtagctgataacagtacagcgcggctgaaatcatcattaaagcggtgaactgccgagtaggtagctgataacggatccgaattcgagcgaaggagatatacatatgtttttgcaaagacctaaaccttacagcgatgaaagtttagaaagtttctttatccgagtggctaacaaaaatggctacggtgatgtccatcgcttcctagaagccactaaacgattccttcaagacattgaccataatggctatcaaacctttccgactgatataactcggataaacccatactcagctaaaaacagttccagcgcacgaactgcgtcattcctgaaacttgcacaattgacatttaatgaaccgccagagctacttgggttggcaattaacagaacaaacatgaaatactcgccgtcaactagcgcggttgttagaggtgcagaagtctttcctcgcagtttactacggacgcactccatcccctgctgtcctttgtgtctgcgagaaaatggctacgcctcctacctttggcactttcaggggtacgaatactgccacagccataacgtacctttaattaccacttgtagctgtggtaaggagtttgactaccgagtatctgggttaaagggcatttgctgcaaatgcaaggagcctatcaccttaaccagcagggagaacggtcatgaggcagcgtgtactgtttcaaactggcttgctggccatgaatctaaacctctgccaaatcttcctaaaagctaccgatggggtttagttcattggtggatgggtattaaagatagcgagttcgatcacttttcgttcgttcaatttttctcaaactggccaaggtcattccactcgataatcgaagatgaagtagagttcaaccttgagcatgctgttgtcagcacgtctgaattacgactaaaagatcttcttggtcgattgtttttcggttcaattcggttacctgagcggaatcttcaacacaatatcatccttggtgagcttctctgctatttagaaaatcgtttatggcaagacaagggattaatcgccaacctcaaaatgaacgcgttagaggcgactgtaatgttaaattgtagcctcgatcagattgcatcaatggttgaacaacgcatcttgaagccaaatcgaaaaagcaagcccaacagccctcttgatgttaccgattatctatttcatttcggcgatattttctgtctttggttagctgagttccaaagcgatgagtttaaccgttcgttttatgtgtcgaggtggtaaatgcaaactctgaaagaactaatcgcatccaatcctgacgacttaacaactgaacttaagagagcatttcgtccactcacaccgcatattgcaattgatggtaatgaacttgacgcactgacgatattagtcaatttaaccgataagactgatgatcagaaagacctgctcgatcgagccaaatgcaagcaaaaacttcgagatgaaaaatggtgggctagctgcataaattgcgttaattacagacaaagccataacccaaaattcccggatatacgttctgaaggcgtgattcgaacccaagccctgggtgaattaccgagtttcctactctcgtcctcaaaaatcccaccataccattggtcatatagccatgattcaaaatacgtcaacaaaagcgcattcctcaccaatgagttttgttgggatggtgagatctcatgtttgggtgagcttcttaaagatgcagatcacccactttggaatactttgaaaaagttaggttgttctcaaaaaacttgcaaagcaatggcaaaacaactagctgatattactctcacgactatcaatgtcacactcgcaccaaattacctgactcaaatatctctccccgatagtgatacatcctacatttcactctctcctgttgcatcgctatcgatgcaaagccactttcatcagaggctccaagatgaaaatcggcatagcgcgataacgcggtttagccgaactaccaacatgggggtcactgcgatgacatgtggcggcgcatttagaatgttaaagtctggcgctaagttttccagcccccctcatcaccgattaaacagtaaacgaagttggttgacgtcagagcatgttcagtcattaaaacagtaccagcgcctcaacaaaagcctcatacctgaaaactctcggattgcactccgtagaaaatacaaaatcgagcttcaaaatatggtcagatcttggtttgcaatgcaagaccatacccttgattcgaacatacttatccaacatttgaatcatgacctatcttacttaggagccacaaaacgttttgcatacgatccagcgatgaccaagctctttactgagcttttgaaacgagagttatcaaattcaatcaataatggtgagcaacacactaatggatcgtttttagtcctaccgaatatcagggtttgtggcgcaacagctttaagctccccggtaacggtggggattccatcacttacagctttctttggcttcgttcacgcatttgaacggaatataaatcgcaccacctcatcgtttcgtgttgaatcctttgcgatatgcgtccatcaactacatgtcgagaagcgaggtttgacagcagagtttgtggaaaaaggcgacgggactatatccgctcccgcgacccgggatgactggcagtgtgatgtcgtatttagccttattttgaacaccaactttgctcaacatattgaccaagatacgttagttacatcactaccaaagcgattggctcggggttcagcaaaaattgcgattgatgactttaaacatatcaactcattctcgacattagaaacagcgatcgaatctctgccaatagaagctggtaggtggttatcactttacgcacagtcaaacaataatctaagtgatctattagcagccatgacagaggaccatcagctcatggcaagctgcgtcggttaccacttgttagaagagcccaaagataaaccaaactccctcagaggttacaaacacgctatcgccgagtgcatcattggactcattaactcaatcacctttagctcagagactgatcccaacacaatcttttggtcgctaaagaactatcaaaactacctagtggtacagccaaggagtatcaacgatgaaactaccgacaaatctagcctatgagcgctctatcgacccatcagatgtctgtttttttgtcgtctggcccgatgatagaaaaacacctttaacctacaattctcgtactctgctcgggcaaatggaagcggcatcattagcctatgatgtctcaggtcaaccaataaaaagtgccaccgctgaggcgttagctcaagggaaccctcatcaagttgatttctgccacgttccatacggtgcgagtcatattgaatgcagtttctccgtctcgttttcttctgaactacgtcaaccatataagtgtaactcaagcaaagttaaacaaacgctagtgcaattagtcgagctctacgaaacgaaaatcggctggactgagctagcaacccgatatttgatgaacatttgcaacggtaaatggctgtggaaaaatacccgtaaagcctattgctggaacattgtacttacaccttggccttggaacggggaaaaggttggatttgaagatattcgtactaactacacctcacggcaagactttaaaaataataaaaattggtctgctatagttgaaatgatcaaaaccgcattttctagtactgatgggctggcgatatttgaagtcagggccaccttgcacttgccaacgaatgctatggtgcggccaagccaagttttcacagaaaaagaaagtggcagtaaaagtaaatctaaaactcaaaacagtcgagtttttcagagtacaactattgatggtgaacgatcgccaatactaggggcctttaaaacgggagcagctattgcaaccattgacgactggtatcctgaagccactgagccactaagggtcggacggtttggggttcatcgcgaagatgtcacttgctaccgtcatccgtctaccggaaaagattttttctcgatattacaacaagcagagcactatattgaagtgttgagcgccaacaaaactcccgctcaagaaactatcaacgacatgcactttttaatggctaacctgattaagggtgggatgttccagcataaaggagactgactgtgaaatggtattataagacaatcacctttctgccagagttgtgcaacaacgagtcactggctgcaaagtgtctccgcgttctgcatggatttaactatcagtatgagacacgaaatatcggcgtttcatttccgctttggtgtgatgcaacggttggaaaaaagatttcatttgtcagcaagaacaagatagaactcgacttactacttaaacaacactatttcgtccaaatggaacaacttcaatactttcatatatccaacactgttctcgtcccagaagattgtacatacgtttcctttagacgctgtcaatctatagataagctcacagcagcagggctggcaaggaaaatcagacgcctggagaaacgtgctctatctagaggcgagcaatttgacccatcatcttttgctcaaaaagagcatactgcaatagcgcactaccactcacttggggagtccagcaaacagacgaaccgcaactttcgactcaatatcaggatgctctcggagcaaccccgtgaggggaactcgatttttagtagctatggcttatcaaattcagaaaactcgtttcagcctgtacccttaatctgacctaggctgctgccaccgctgagcaataactagcataaccccttggggcctctaaacgggtcttgaggggttttttgctgaaacctcaggcatttgagaagcacacggtcacactgcttccggtagtcaataaaccggtaaaccagcaatagacataagcggctatttaacgaccctgccctgaaccgacgaccgggtcatcgtggccggatcttgcggcccctcggcttgaacgaattgttagacattatttgccgactaccttggtgatctcgcctttcacgtagtggacaaattcttccaactgatctgcgcgcgaggccaagcgatcttcttcttgtccaagataagcctgtctagcttcaagtatgacgggctgatactgggccggcaggcgctccattgcccagtcggcagcgacatccttcggcgcgattttgccggttactgcgctgtaccaaatgcgggacaacgtaagcactacatttcgctcatcgccagcccagtcgggcggcgagttccatagcgttaaggtttcatttagcgcctcaaatagatcctgttcaggaaccggatcaaagagttcctccgccgctggacctaccaaggcaacgctatgttctcttgcttttgtcagcaagatagccagatcaatgtcgatcgtggctggctcgaagatacctgcaagaatgtcattgcgctgccattctccaaattgcagttcgcgcttagctggataacgccacggaatgatgtcgtcgtgcacaacaatggtgacttctacagcgcggagaatctcgctctctccaggggaagccgaagtttccaaaaggtcgttgatcaaagctcgccgcgttgtttcatcaagccttacggtcaccgtaaccagcaaatcaatatcactgtgtggcttcaggccgccatccactgcggagccgtacaaatgtacggccagcaacgtcggttcgagatggcgctcgatgacgccaactacctctgatagttgagtcgatacttcggcgatcaccgcttccctcatactcttcctttttcaatattattgaagcatttatcagggttattgtctcatgagcggatacatatttgaatgtatttagaaaaataaacaaatagctagctcactcggtcgctacgctccgggcgtgagactgcggcgggcgctgcggacacatacaaagttacccacagattccgtggataagcaggggactaacatgtgaggcaaaacagcagggccgcgccggtggcgtttttccataggctccgccctcctgccagagttcacataaacagacgcttttccggtgcatctgtgggagccgtgaggctcaaccatgaatctgacagtacgggcgaaacccgacaggacttaaagatccccaccgtttccggcgggtcgctccctcttgcgctctcctgttccgaccctgccgtttaccggatacctgttccgcctttctcccttacgggaagtgtggcgctttctcatagctcacacactggtatctcggctcggtgtaggtcgttcgctccaagctgggctgtaagcaagaactccccgttcagcccgactgctgcgccttatccggtaactgttcacttgagtccaacccggaaaagcacggtaaaacgccactggcagcagccattggtaactgggagttcgcagaggatttgtttagctaaacacgcggttgctcttgaagtgtgcgccaaagtccggctacactggaaggacagatttggttgctgtgctctgcgaaagccagttaccacggttaagcagttccccaactgacttaaccttcgatcaaaccacctccccaggtggttttttcgtttacagggcaaaagattacgcgcagaaaaaaaggatctcaagaagatcctttgatcttttctactgaaccgctctagatttcagtgcaatttatctcttcaaatgtagcacctgaagtcagccccatacgatataagttgtaattctcatgttagtcatgccccgcgcccaccggaaggagctgactgggttgaaggctctcaagggcatcggtcgagatcccggtgcctaatgagtgagctaacttacattaattgcgttgcgctcactgcccgctttccagtcgggaaacctgtcgtgccagctgcattaatgaatcggccaacgcgcggggagaggcggtttgcgtattgggcgccagggtggtttttcttttcaccagtgagacgggcaacagctgattgcccttcaccgcctggccctgagagagttgcagcaagcggtccacgctggtttgccccagcaggcgaaaatcctgtttgatggtggttaacggcgggatataacatgagctgtcttcggtatcgtcgtatcccactaccgagatgtccgcaccaacgcgcagcccggactcggtaatggcgcgcattgcgcccagcgccatctgatcgttggcaaccagcatcgcagtgggaacgatgccctcattcagcatttgcatggtttgttgaaaaccggacatggcactccagtcgccttcccgttccgctatcggctgaatttgattgcgagtgagatatttatgccagccagccagacgcagacgcgccgagacagaacttaatgggcccgctaacagcgcgatttgctggtgacccaatgcgaccagatgctccacgcccagtcgcgtaccgtcttcatgggagaaaataatactgttgatgggtgtctggtcagagacatcaagaaataacgccggaacattagtgcaggcagcttccacagcaatggcatcctggtcatccagcggatagttaatgatcagcccactgacgcgttgcgcgagaagattgtgcaccgccgctttacaggcttcgacgccgcttcgttctaccatcgacaccaccacgctggcacccagttgatcggcgcgagatttaatcgccgcgacaatttgcgacggcgcgtgcagggccagactggaggtggcaacgccaatcagcaacgactgtttgcccgccagttgttgtgccacgcggttgggaatgtaattcagctccgccatcgccgcttccactttttcccgcgttttcgcagaaacgtggctggcctggttcaccacgcgggaaacggtctgataagagacaccggcatactctgcgacatcgtataacgttactggtttcac

SEQ ID NO: 10 - DNA, 8496 bp, artificial sequence
  Synthetic
cgggatctcgacgctctcccttatgcgactcctgcattaggaaattaatacgactcactataggggaattgtgagcggataacaattcccctgtagaaataattttgtttaactttaataaggagatataccatgggcagcagccatcaccatcatcaccacagccaggatccgaattcgagctcggcgcgcctgcaggtcgacaagcttgcggccgcataatgcttaagtcgaacagaaagtaatcgtattgtacacggccgcataatcgaaattaatacgactcactataggggaattgtgagcggataacaattccccatcttagtatattagttaagtataagaaggagatatacatatgtttttgcaaagacctaaaccttacagcgatgaaagtttagaaagtttctttatccgagtggctaacaaaaatggctacggtgatgtccatcgcttcctagaagccactaaacgattccttcaagacattgaccataatggctatcaaacctttccgactgatataactcggataaacccatactcagctaaaaacagttccagcgcacgaactgcgtcattcctgaaacttgcacaattgacatttaatgaaccgccagagctacttgggttggcaattaacagaacaaacatgaaatactcgccgtcaactagcgcggttgttagaggtgcagaagtctttcctcgcagtttactacggacgcactccatcccctgctgtcctttgtgtctgcgagaaaatggctacgcctcctacctttggcactttcaggggtacgaatactgccacagccataacgtacctttaattaccacttgtagctgtggtaaggagtttgactaccgagtatctgggttaaagggcatttgctgcaaatgcaaggagcctatcaccttaaccagcagggagaacggtcatgaggcagcgtgtactgtttcaaactggcttgctggccatgaatctaaacctctgccaaatcttcctaaaagctaccgatggggtttagttcattggtggatgggtattaaagatagcgagttcgatcacttttcgttcgttcaatttttctcaaactggccaaggtcattccactcgataatcgaagatgaagtagagttcaaccttgagcatgctgttgtcagcacgtctgaattacgactaaaagatcttcttggtcgattgtttttcggttcaattcggttacctgagcggaatcttcaacacaatatcatccttggtgagcttctctgctatttagaaaatcgtttatggcaagacaagggattaatcgccaacctcaaaatgaacgcgttagaggcgactgtaatgttaaattgtagcctcgatcagattgcatcaatggttgaacaacgcatcttgaagccaaatcgaaaaagcaagcccaacagccctcttgatgttaccgattatctatttcatttcggcgatattttctgtctttggttagctgagttccaaagcgatgagtttaaccgttcgttttatgtgtcgaggtggtaaatgcaaactctgaaagaactaatcgcatccaatcctgacgacttaacaactgaacttaagagagcatttcgtccactcacaccgcatattgcaattgatggtaatgaacttgacgcactgacgatattagtcaatttaaccgataagactgatgatcagaaagacctgctcgatcgagccaaatgcaagcaaaaacttcgagatgaaaaatggtgggctagctgcataaattgcgttaattacagacaaagccataacccaaaattcccggatatacgttctgaaggcgtgattcgaacccaagccctgggtgaattaccgagtttcctactctcgtcctcaaaaatcccaccataccattggtcatatagccatgattcaaaatacgtcaacaaaagcgcattcctcaccaatgagttttgttgggatggtgagatctcatgtttgggtgagcttcttaaagatgcagatcacccactttggaatactttgaaaaagttaggttgttctcaaaaaacttgcaaagcaatggcaaaacaactagctgatattactctcacgactatcaatgtcacactcgcaccaaattacctgactcaaatatctctccccgatagtgatacatcctacatttcactctctcctgttgcatcgctatcgatgcaaagccactttcatcagaggctccaagatgaaaatcggcatagcgcgataacgcggtttagccgaactaccaacatgggggtcactgcgatgacatgtggcggcgcatttagaatgttaaagtctggcgctaagttttccagcccccctcatcaccgattaaacagtaaacgaagttggttgacgtcagagcatgttcagtcattaaaacagtaccagcgcctcaacaaaagcctcatacctgaaaactctcggattgcactccgtagaaaatacaaaatcgagcttcaaaatatggtcagatcttggtttgcaatgcaagaccatacccttgattcgaacatacttatccaacatttgaatcatgacctatcttacttaggagccacaaaacgttttgcatacgatccagcgatgaccaagctctttactgagcttttgaaacgagagttatcaaattcaatcaataatggtgagcaacacactaatggatcgtttttagtcctaccgaatatcagggtttgtggcgcaacagctttaagctccccggtaacggtggggattccatcacttacagctttctttggcttcgttcacgcatttgaacggaatataaatcgcaccacctcatcgtttcgtgttgaatcctttgcgatatgcgtccatcaactacatgtcgagaagcgaggtttgacagcagagtttgtggaaaaaggcgacgggactatatccgctcccgcgacccgggatgactggcagtgtgatgtcgtatttagccttattttgaacaccaactttgctcaacatattgaccaagatacgttagttacatcactaccaaagcgattggctcggggttcagcaaaaattgcgattgatgactttaaacatatcaactcattctcgacattagaaacagcgatcgaatctctgccaatagaagctggtaggtggttatcactttacgcacagtcaaacaataatctaagtgatctattagcagccatgacagaggaccatcagctcatggcaagctgcgtcggttaccacttgttagaagagcccaaagataaaccaaactccctcagaggttacaaacacgctatcgccgagtgcatcattggactcattaactcaatcacctttagctcagagactgatcccaacacaatcttttggtcgctaaagaactatcaaaactacctagtggtacagccaaggagtatcaacgatgaaactaccgacaaatctagcctatgagcgctctatcgacccatcagatgtctgtttttttgtcgtctggcccgatgatagaaaaacacctttaacctacaattctcgtactctgctcgggcaaatggaagcggcatcattagcctatgatgtctcaggtcaaccaataaaaagtgccaccgctgaggcgttagctcaagggaaccctcatcaagttgatttctgccacgttccatacggtgcgagtcatattgaatgcagtttctccgtctcgttttcttctgaactacgtcaaccatataagtgtaactcaagcaaagttaaacaaacgctagtgcaattagtcgagctctacgaaacgaaaatcggctggactgagctagcaacccgatatttgatgaacatttgcaacggtaaatggctgtggaaaaatacccgtaaagcctattgctggaacattgtacttacaccttggccttggaacggggaaaaggttggatttgaagatattcgtactaactacacctcacggcaagactttaaaaataataaaaattggtctgctatagttgaaatgatcaaaaccgcattttctagtactgatgggctggcgatatttgaagtcagggccaccttgcacttgccaacgaatgctatggtgcggccaagccaagttttcacagaaaaagaaagtggcagtaaaagtaaatctaaaactcaaaacagtcgagtttttcagagtacaactattgatggtgaacgatcgccaatactaggggcctttaaaacgggagcagctattgcaaccattgacgactggtatcctgaagccactgagccactaagggtcggacggtttggggttcatcgcgaagatgtcacttgctaccgtcatccgtctaccggaaaagattttttctcgatattacaacaagcagagcactatattgaagtgttgagcgccaacaaaactcccgctcaagaaactatcaacgacatgcactttttaatggctaacctgattaagggtgggatgttccagcataaaggagactgactgtgaaatggtattataagacaatcacctttctgccagagttgtgcaacaacgagtcactggctgcaaagtgtctccgcgttctgcatggatttaactatcagtatgagacacgaaatatcggcgtttcatttccgctttggtgtgatgcaacggttggaaaaaagatttcatttgtcagcaagaacaagatagaactcgacttactacttaaacaacactatttcgtccaaatggaacaacttcaatactttcatatatccaacactgttctcgtcccagaagattgtacatacgtttcctttagacgctgtcaatctatagataagctcacagcagcagggctggcaaggaaaatcagacgcctggagaaacgtgctctatctagaggcgagcaatttgacccatcatcttttgctcaaaaagagcatactgcaatagcgcactaccactcacttggggagtccagcaaacagacgaaccgcaactttcgactcaatatcaggatgctctcggagcaaccccgtgaggggaactcgatttttagtagctatggcttatcaaattcagaaaactcgtttcagcctgtacccttaatctgacgatataccatgggtgaactgccgagtaggtagctgataacagtacagcgcggctgaaatcatcattaaagcggtgaactgccgagtaggtagctgataacggatccgaattcgctgctgccaccgctgagcaataactagcataaccccttggggcctctaaacgggtcttgaggggttttttgctgaaacctcaggcatttgagaagcacacggtcacactgcttccggtagtcaataaaccggtaaaccagcaatagacataagcggctatttaacgaccctgccctgaaccgacgaccgggtcatcgtggccggatcttgcggcccctcggcttgaacgaattgttagacattatttgccgactaccttggtgatctcgcctttcacgtagtggacaaattcttccaactgatctgcgcgcgaggccaagcgatcttcttcttgtccaagataagcctgtctagcttcaagtatgacgggctgatactgggccggcaggcgctccattgcccagtcggcagcgacatccttcggcgcgattttgccggttactgcgctgtaccaaatgcgggacaacgtaagcactacatttcgctcatcgccagcccagtcgggcggcgagttccatagcgttaaggtttcatttagcgcctcaaatagatcctgttcaggaaccggatcaaagagttcctccgccgctggacctaccaaggcaacgctatgttctcttgcttttgtcagcaagatagccagatcaatgtcgatcgtggctggctcgaagatacctgcaagaatgtcattgcgctgccattctccaaattgcagttcgcgcttagctggataacgccacggaatgatgtcgtcgtgcacaacaatggtgacttctacagcgcggagaatctcgctctctccaggggaagccgaagtttccaaaaggtcgttgatcaaagctcgccgcgttgtttcatcaagccttacggtcaccgtaaccagcaaatcaatatcactgtgtggcttcaggccgccatccactgcggagccgtacaaatgtacggccagcaacgtcggttcgagatggcgctcgatgacgccaactacctctgatagttgagtcgatacttcggcgatcaccgcttccctcatactcttcctttttcaatattattgaagcatttatcagggttattgtctcatgagcggatacatatttgaatgtatttagaaaaataaacaaatagctagctcactcggtcgctacgctccgggcgtgagactgcggcgggcgctgcggacacatacaaagttacccacagattccgtggataagcaggggactaacatgtgaggcaaaacagcagggccgcgccggtggcgtttttccataggctccgccctcctgccagagttcacataaacagacgcttttccggtgcatctgtgggagccgtgaggctcaaccatgaatctgacagtacgggcgaaacccgacaggacttaaagatccccaccgtttccggcgggtcgctccctcttgcgctctcctgttccgaccctgccgtttaccggatacctgttccgcctttctcccttacgggaagtgtggcgctttctcatagctcacacactggtatctcggctcggtgtaggtcgttcgctccaagctgggctgtaagcaagaactccccgttcagcccgactgctgcgccttatccggtaactgttcacttgagtccaacccggaaaagcacggtaaaacgccactggcagcagccattggtaactgggagttcgcagaggatttgtttagctaaacacgcggttgctcttgaagtgtgcgccaaagtccggctacactggaaggacagatttggttgctgtgctctgcgaaagccagttaccacggttaagcagttccccaactgacttaaccttcgatcaaaccacctccccaggtggttttttcgtttacagggcaaaagattacgcgcagaaaaaaaggatctcaagaagatcctttgatcttttctactgaaccgctctagatttcagtgcaatttatctcttcaaatgtagcacctgaagtcagccccatacgatataagttgtaattctcatgttagtcatgccccgcgcccaccggaaggagctgactgggttgaaggctctcaagggcatcggtcgagatcccggtgcctaatgagtgagctaacttacattaattgcgttgcgctcactgcccgctttccagtcgggaaacctgtcgtgccagctgcattaatgaatcggccaacgcgcggggagaggcggtttgcgtattgggcgccagggtggtttttcttttcaccagtgagacgggcaacagctgattgcccttcaccgcctggccctgagagagttgcagcaagcggtccacgctggtttgccccagcaggcgaaaatcctgtttgatggtggttaacggcgggatataacatgagctgtcttcggtatcgtcgtatcccactaccgagatgtccgcaccaacgcgcagcccggactcggtaatggcgcgcattgcgcccagcgccatctgatcgttggcaaccagcatcgcagtgggaacgatgccctcattcagcatttgcatggtttgttgaaaaccggacatggcactccagtcgccttcccgttccgctatcggctgaatttgattgcgagtgagatatttatgccagccagccagacgcagacgcgccgagacagaacttaatgggcccgctaacagcgcgatttgctggtgacccaatgcgaccagatgctccacgcccagtcgcgtaccgtcttcatgggagaaaataatactgttgatgggtgtctggtcagagacatcaagaaataacgccggaacattagtgcaggcagcttccacagcaatggcatcctggtcatccagcggatagttaatgatcagcccactgacgcgttgcgcgagaagattgtgcaccgccgctttacaggcttcgacgccgcttcgttctaccatcgacaccaccacgctggcacccagttgatcggcgcgagatttaatcgccgcgacaatttgcgacggcgcgtgcagggccagactggaggtggcaacgccaatcagcaacgactgtttgcccgccagttgttgtgccacgcggttgggaatgtaattcagctccgccatcgccgcttccactttttcccgcgttttcgcagaaacgtggctggcctggttcaccacgcgggaaacggtctgataagagacaccggcatactctgcgacatcgtataacgttactggtttcacattcaccaccctgaattgactctcttccgggcgctatcatgccataccgcgaaaggttttgcgccattcgatggtgtc

SEQ ID NO: 11 - DNA, 11975 bp, artificial sequence
  Synthetic
attcaccaccctgaattgactctcttccgggcgctatcatgccataccgcgaaaggttttgcgccattcgatggtgtccgggatctcgacgctctcccttatgcgactcctgcattaggaaattaatacgactcactataggggaattgtgagcggataacaattcccctgtagaaataattttgtttaactttaataaggagatataccatgggtgaactgccgagtaggtagctgataacagtacagcgcggctgaaatcatcattaaagcggtgaactgccgagtaggtagctgataacggatccgaattcgagctcggcgcgcctgcaggtcgacaagcttgcggccgcataatgcttaagtcgaacagaaagtaatcgtattgtacacggccgcataatcgaaattaatacgactcactataggggaattgtgagcggataacaattccccatcttagtatattagttaagtataagaaggagatatacatatgtttttgcaaagacctaaaccttacagcgatgaaagtttagaaagtttctttatccgagtggctaacaaaaatggctacggtgatgtccatcgcttcctagaagccactaaacgattccttcaagacattgaccataatggctatcaaacctttccgactgatataactcggataaacccatactcagctaaaaacagttccagcgcacgaactgcgtcattcctgaaacttgcacaattgacatttaatgaaccgccagagctacttgggttggcaattaacagaacaaacatgaaatactcgccgtcaactagcgcggttgttagaggtgcagaagtctttcctcgcagtttactacggacgcactccatcccctgctgtcctttgtgtctgcgagaaaatggctacgcctcctacctttggcactttcaggggtacgaatactgccacagccataacgtacctttaattaccacttgtagctgtggtaaggagtttgactaccgagtatctgggttaaagggcatttgctgcaaatgcaaggagcctatcaccttaaccagcagggagaacggtcatgaggcagcgtgtactgtttcaaactggcttgctggccatgaatctaaacctctgccaaatcttcctaaaagctaccgatggggtttagttcattggtggatgggtattaaagatagcgagttcgatcacttttcgttcgttcaatttttctcaaactggccaaggtcattccactcgataatcgaagatgaagtagagttcaaccttgagcatgctgttgtcagcacgtctgaattacgactaaaagatcttcttggtcgattgtttttcggttcaattcggttacctgagcggaatcttcaacacaatatcatccttggtgagcttctctgctatttagaaaatcgtttatggcaagacaagggattaatcgccaacctcaaaatgaacgcgttagaggcgactgtaatgttaaattgtagcctcgatcagattgcatcaatggttgaacaacgcatcttgaagccaaatcgaaaaagcaagcccaacagccctcttgatgttaccgattatctatttcatttcggcgatattttctgtctttggttagctgagttccaaagcgatgagtttaaccgttcgttttatgtgtcgaggtggtaaatgcaaactctgaaagaactaatcgcatccaatcctgacgacttaacaactgaacttaagagagcatttcgtccactcacaccgcatattgcaattgatggtaatgaacttgacgcactgacgatattagtcaatttaaccgataagactgatgatcagaaagacctgctcgatcgagccaaatgcaagcaaaaacttcgagatgaaaaatggtgggctagctgcataaattgcgttaattacagacaaagccataacccaaaattcccggatatacgttctgaaggcgtgattcgaacccaagccctgggtgaattaccgagtttcctactctcgtcctcaaaaatcccaccataccattggtcatatagccatgattcaaaatacgtcaacaaaagcgcattcctcaccaatgagttttgttgggatggtgagatctcatgtttgggtgagcttcttaaagatgcagatcacccactttggaatactttgaaaaagttaggttgttctcaaaaaacttgcaaagcaatggcaaaacaactagctgatattactctcacgactatcaatgtcacactcgcaccaaattacctgactcaaatatctctccccgatagtgatacatcctacatttcactctctcctgttgcatcgctatcgatgcaaagccactttcatcagaggctccaagatgaaaatcggcatagcgcgataacgcggtttagccgaactaccaacatgggggtcactgcgatgacatgtggcggcgcatttagaatgttaaagtctggcgctaagttttccagcccccctcatcaccgattaaacagtaaacgaagttggttgacgtcagagcatgttcagtcattaaaacagtaccagcgcctcaacaaaagcctcatacctgaaaactctcggattgcactccgtagaaaatacaaaatcgagcttcaaaatatggtcagatcttggtttgcaatgcaagaccatacccttgattcgaacatacttatccaacatttgaatcatgacctatcttacttaggagccacaaaacgttttgcatacgatccagcgatgaccaagctctttactgagcttttgaaacgagagttatcaaattcaatcaataatggtgagcaacacactaatggatcgtttttagtcctaccgaatatcagggtttgtggcgcaacagctttaagctccccggtaacggtggggattccatcacttacagctttctttggcttcgttcacgcatttgaacggaatataaatcgcaccacctcatcgtttcgtgttgaatcctttgcgatatgcgtccatcaactacatgtcgagaagcgaggtttgacagcagagtttgtggaaaaaggcgacgggactatatccgctcccgcgacccgggatgactggcagtgtgatgtcgtatttagccttattttgaacaccaactttgctcaacatattgaccaagatacgttagttacatcactaccaaagcgattggctcggggttcagcaaaaattgcgattgatgactttaaacatatcaactcattctcgacattagaaacagcgatcgaatctctgccaatagaagctggtaggtggttatcactttacgcacagtcaaacaataatctaagtgatctattagcagccatgacagaggaccatcagctcatggcaagctgcgtcggttaccacttgttagaagagcccaaagataaaccaaactccctcagaggttacaaacacgctatcgccgagtgcatcattggactcattaactcaatcacctttagctcagagactgatcccaacacaatcttttggtcgctaaagaactatcaaaactacctagtggtacagccaaggagtatcaacgatgaaactaccgacaaatctagcctatgagcgctctatcgacccatcagatgtctgtttttttgtcgtctggcccgatgatagaaaaacacctttaacctacaattctcgtactctgctcgggcaaatggaagcggcatcattagcctatgatgtctcaggtcaaccaataaaaagtgccaccgctgaggcgttagctcaagggaaccctcatcaagttgatttctgccacgttccatacggtgcgagtcatattgaatgcagtttctccgtctcgttttcttctgaactacgtcaaccatataagtgtaactcaagcaaagttaaacaaacgctagtgcaattagtcgagctctacgaaacgaaaatcggctggactgagctagcaacccgatatttgatgaacatttgcaacggtaaatggctgtggaaaaatacccgtaaagcctattgctggaacattgtacttacaccttggccttggaacggggaaaaggttggatttgaagatattcgtactaactacacctcacggcaagactttaaaaataataaaaattggtctgctatagttgaaatgatcaaaaccgcattttctagtactgatgggctggcgatatttgaagtcagggccaccttgcacttgccaacgaatgctatggtgcggccaagccaagttttcacagaaaaagaaagtggcagtaaaagtaaatctaaaactcaaaacagtcgagtttttcagagtacaactattgatggtgaacgatcgccaatactaggggcctttaaaacgggagcagctattgcaaccattgacgactggtatcctgaagccactgagccactaagggtcggacggtttggggttcatcgcgaagatgtcacttgctaccgtcatccgtctaccggaaaagattttttctcgatattacaacaagcagagcactatattgaagtgttgagcgccaacaaaactcccgctcaagaaactatcaacgacatgcactttttaatggctaacctgattaagggtgggatgttccagcataaaggagactgactgtgaaatggtattataagacaatcacctttctgccagagttgtgcaacaacgagtcactggctgcaaagtgtctccgcgttctgcatggatttaactatcagtatgagacacgaaatatcggcgtttcatttccgctttggtgtgatgcaacggttggaaaaaagatttcatttgtcagcaagaacaagatagaactcgacttactacttaaacaacactatttcgtccaaatggaacaacttcaatactttcatatatccaacactgttctcgtcccagaagattgtacatacgtttcctttagacgctgtcaatctatagataagctcacagcagcagggctggcaaggaaaatcagacgcctggagaaacgtgctctatctagaggcgagcaatttgacccatcatcttttgctcaaaaagagcatactgcaatagcgcactaccactcacttggggagtccagcaaacagacgaaccgcaactttcgactcaatatcaggatgctctcggagcaaccccgtgaggggaactcgatttttagtagctatggcttatcaaattcagaaaactcgtttcagcctgtacccttaatctgacctttaataaggagatataccatggcgacaagtttacctacgccctcagcaattacgacttcggcgttagagtatgcattccatactcccgctcgcaatctaacgaaatctcgcggaaaaaacattcatcgttatgtcagtgtaaagatgagtaagaggattacggtagaatctactctagagtgtgatgcctgctatcactttgattttgagccaagtattgttcgcttttgcgctcaaccgattcgatttttatattatctcaatggtcagtctcactcctatgttcctgactttctagttcaatttgataccaacgagtttgttctatatgaagtaaagtcagcttatgctaagaacaaacctgattttgatgttgaatgggaggcgaaagtaaaagcagcaactgaactagggctagaattggagcttgttgaagagagtgatattagggatacggttgtattaaataatcttaagcgcatgcatcgttatgcttcgaaagatgagctgaataacgtacataactctctcttaaaaataataaagtacaatggcgcccaatctgcaagatgcttgggagaacagttgggtttaaaaggccgaactgttttaccaattttgtgcgatttgctgtcaaggtgtttactcgatacacgtttggataagcctctatctcttgaatctcgatttgagttggccagttatggctaagaaagggttctcaagtttccatagaaaagcagtctcttcccaagatacgcttgaatcgatagagcttgtctctagcgctaattgtctagaaagtgttacgtatcaagatatatcagcatttcccgaaacaattgcggtagagattaatttccgattaagcattcttcgctttttagcgcgaaagtgcgaaaccattgtggccaaatcaattgaaccacatcgtgtagagctacagcaaaactatagtagaaaaatacccagtgcaataacgatatatcgatggtggcttgcttttcgaaaatcagactacaaccccattagcttagcacctaatatcaaggatagaggtaatagagagacaaaagtgtcaacagttgttgattctattatggaacaggcagttgaaagagttatatctggacgaaaagtcaatgttagctctgcatataaacgtgttcgacgaaaagttcgtcaatacaatctaactcatggaacgaaatacacgtatcctaagtacgaatctgtaagaaagcgagtaaaaaagaaaaccccatttgagttattagccgcagggaaaggggagagagtagctaagagagagtttcgccgaatgggaaaaaagatcctcacgtctagcgtgctagagagggttgaaatagatcacactgtcgttgacctttttgcagtacacgaagagtatcgaatcccattgggccgaccttggcttactcaattggttgattgttacagtaaagctgtaatcggtttttatttaggtttcgagcctcctagctatgtgtcggtttcccttgcacttaagaatgcaatacaacgcaaagatgacttaatctcctcgtatgaatcgatcgagaatgaatggctatgttatggcatcccagacctactcgtaactgataatggtaaagagtttttgtcgaaagcatttgatcaagcatgtgaatcactattgatcaatgtgcatcaaaataaagttgagacgcccgacaacaaacctcatgttgaacgtaactacgggactattaatacttctctgttagacgatttacctgggaaatccttcagccagtaccttcaaagagaagggtacgactctgtgggagaagctacccttacactcaatgagattagagaaatttacttaatttggttggtggatatttatcataaaaaacccaatcagagaggcactaattgtcctaatgttgcgtggaaaaagggttgtcaagaatgggaaccagaggagttctctggttctaaagacgaattagactttaaatttgctattgttgattacaaacaacttactaaagtagggataactgtctacaaagaactgagttatagcaatgaccgtttagctgaatatagagggaagaaaggaaaccataaagttcagttcaagtataaccctgagtgtatggcagttatttgggtgttggatgaggatatgaatgagtactttacagttaatgcgattgactacgaatatgcaagtagagtatcactttggcaacataaatataacatgaaatatcaagcagaactaaattcagcagaatatgatgaggacaaggaaattgatgcagaaataaaaattgaagaaatcgcagatcgttcaattgttaagactaacaaaatcagagctcggaggcgtggcgctaggcatcaagagaatagcgcaagggctaagtcaatcagtaatgcgaacccggcctcgatacaaaaacatgaagatgaaatcgttagtgcagataatgacgattgggatattgattatgtctgagaaatcgtcaaatgagtgaaacgcgtgaggctcgtatatcaagagctaaaagggcatttgtatccacaccgagcgttaggaaaatcttgagttacatggatagatgtagagatctatcagacctagagtctgagcctacatgcatgatggtctatggtgcttcgggtgtaggtaaaacgaccgtcatcaagaaatacttaaatcaaaacagaagagagtccgaagccgggggcgatataataccggttttgcatattgagttgccagacaatgcgaagccagtagatgcagcaagggaattgctggttgaaatgggtgacccgctagcactttatgaaactgacttagctagattgacgaaaagactgactgaattaatccctgcggtcggcgtgaagctgattattatcgatgagttccaacatttggtggaagaaaggtcaaatcgggttcttacccaagtaggtaattggctaaaaatgatacttaacaaaacgaaatgtccaattgttatatttggtatgccatactcaaaagttgtactgcaagcaaactcgcaacttcacgggcgattttccattcaggttgaactgcgcccctttagctaccagggaggtagaggtgtatttaaaacttttttggaataccttgataaagccctaccttttgaaaaacaggctggcttagccaacgaaagtttgcagaaaaaattgtatgcattctctcagggaaacatgcgttcgttgagaaaccttatttatcaagcatctatcgaagcaattgataatcagcatgagacgataaccgaagaagatttcgtttttgcatcgaagttgacatcgggcgataaacccaactcatggaaaaatccttttgaggagggtgttgaggtaacagaagatatgttacgaccgccaccaaaagatattggttgggaggactatttgagacattcaaccccgagagtgagtaaaccaggtagaaataaaaactttttcgaataacctaggctgctgcgctgctgccaccgctgagcaataactagcataaccccttggggcctctaaacgggtcttgaggggttttttgctgaaacctcaggcatttgagaagcacacggtcacactgcttccggtagtcaataaaccggtaaaccagcaatagacataagcggctatttaacgaccctgccctgaaccgacgaccgggtcatcgtggccggatcttgcggcccctcggcttgaacgaattgttagacattatttgccgactaccttggtgatctcgcctttcacgtagtggacaaattcttccaactgatctgcgcgcgaggccaagcgatcttcttcttgtccaagataagcctgtctagcttcaagtatgacgggctgatactgggccggcaggcgctccattgcccagtcggcagcgacatccttcggcgcgattttgccggttactgcgctgtaccaaatgcgggacaacgtaagcactacatttcgctcatcgccagcccagtcgggcggcgagttccatagcgttaaggtttcatttagcgcctcaaatagatcctgttcaggaaccggatcaaagagttcctccgccgctggacctaccaaggcaacgctatgttctcttgcttttgtcagcaagatagccagatcaatgtcgatcgtggctggctcgaagatacctgcaagaatgtcattgcgctgccattctccaaattgcagttcgcgcttagctggataacgccacggaatgatgtcgtcgtgcacaacaatggtgacttctacagcgcggagaatctcgctctctccaggggaagccgaagtttccaaaaggtcgttgatcaaagctcgccgcgttgtttcatcaagccttacggtcaccgtaaccagcaaatcaatatcactgtgtggcttcaggccgccatccactgcggagccgtacaaatgtacggccagcaacgtcggttcgagatggcgctcgatgacgccaactacctctgatagttgagtcgatacttcggcgatcaccgcttccctcatactcttcctttttcaatattattgaagcatttatcagggttattgtctcatgagcggatacatatttgaatgtatttagaaaaataaacaaatagctagctcactcggtcgctacgctccgggcgtgagactgcggcgggcgctgcggacacatacaaagttacccacagattccgtggataagcaggggactaacatgtgaggcaaaacagcagggccgcgccggtggcgtttttccataggctccgccctcctgccagagttcacataaacagacgcttttccggtgcatctgtgggagccgtgaggctcaaccatgaatctgacagtacgggcgaaacccgacaggacttaaagatccccaccgtttccggcgggtcgctccctcttgcgctctcctgttccgaccctgccgtttaccggatacctgttccgcctttctcccttacgggaagtgtggcgctttctcatagctcacacactggtatctcggctcggtgtaggtcgttcgctccaagctgggctgtaagcaagaactccccgttcagcccgactgctgcgccttatccggtaactgttcacttgagtccaacccggaaaagcacggtaaaacgccactggcagcagccattggtaactgggagttcgcagaggatttgtttagctaaacacgcggttgctcttgaagtgtgcgccaaagtccggctacactggaaggacagatttggttgctgtgctctgcgaaagccagttaccacggttaagcagttccccaactgacttaaccttcgatcaaaccacctccccaggtggttttttcgtttacagggcaaaagattacgcgcagaaaaaaaggatctcaagaagatcctttgatcttttctactgaaccgctctagatttcagtgcaatttatctcttcaaatgtagcacctgaagtcagccccatacgatataagttgtaattctcatgttagtcatgccccgcgcccaccggaaggagctgactgggttgaaggctctcaagggcatcggtcgagatcccggtgcctaatgagtgagctaacttacattaattgcgttgcgctcactgcccgctttccagtcgggaaacctgtcgtgccagctgcattaatgaatcggccaacgcgcggggagaggcggtttgcgtattgggcgccagggtggtttttcttttcaccagtgagacgggcaacagctgattgcccttcaccgcctggccctgagagagttgcagcaagcggtccacgctggtttgccccagcaggcgaaaatcctgtttgatggtggttaacggcgggatataacatgagctgtcttcggtatcgtcgtatcccactaccgagatgtccgcaccaacgcgcagcccggactcggtaatggcgcgcattgcgcccagcgccatctgatcgttggcaaccagcatcgcagtgggaacgatgccctcattcagcatttgcatggtttgttgaaaaccggacatggcactccagtcgccttcccgttccgctatcggctgaatttgattgcgagtgagatatttatgccagccagccagacgcagacgcgccgagacagaacttaatgggcccgctaacagcgcgatttgctggtgacccaatgcgaccagatgctccacgcccagtcgcgtaccgtcttcatgggagaaaataatactgttgatgggtgtctggtcagagacatcaagaaataacgccggaacattagtgcaggcagcttccacagcaatggcatcctggtcatccagcggatagttaatgatcagcccactgacgcgttgcgcgagaagattgtgcaccgccgctttacaggcttcgacgccgcttcgttctaccatcgacaccaccacgctggcacccagttgatcggcgcgagatttaatcgccgcgacaatttgcgacggcgcgtgcagggccagactggaggtggcaacgccaatcagcaacgactgtttgcccgccagttgttgtgccacgcggttgggaatgtaattcagctccgccatcgccgcttccactttttcccgcgttttcgcagaaacgtggctggcctggttcaccacgcgggaaacggtctgataagagacaccggcatactctgcgacatcgtataacgttactggtttcac

SEQ ID NO: 12 - DNA, 11812 bp, artificial sequence
  Synthetic
attcaccaccctgaattgactctcttccgggcgctatcatgccataccgcgaaaggttttgcgccattcgatggtgtccgggatctcgacgctctcccttatgcgactcctgcattaggaaattaatacgactcactataggggaattgtgagcggataacaattcccctgtagaaataattttgtttaactttaataaggagatataccatgggtgaactgccgagtaggtagctgataacgagacctctgtcttgtcagctagggtggtctcgtgaactgccgagtaggtagctgataacggatccgaattcgagcgaaggagatatacatatgtttttgcaaagacctaaaccttacagcgatgaaagtttagaaagtttctttatccgagtggctaacaaaaatggctacggtgatgtccatcgcttcctagaagccactaaacgattccttcaagacattgaccataatggctatcaaacctttccgactgatataactcggataaacccatactcagctaaaaacagttccagcgcacgaactgcgtcattcctgaaacttgcacaattgacatttaatgaaccgccagagctacttgggttggcaattaacagaacaaacatgaaatactcgccgtcaactagcgcggttgttagaggtgcagaagtctttcctcgcagtttactacggacgcactccatcccctgctgtcctttgtgtctgcgagaaaatggctacgcctcctacctttggcactttcaggggtacgaatactgccacagccataacgtacctttaattaccacttgtagctgtggtaaggagtttgactaccgagtatctgggttaaagggcatttgctgcaaatgcaaggagcctatcaccttaaccagcagggagaacggtcatgaggcagcgtgtactgtttcaaactggcttgctggccatgaatctaaacctctgccaaatcttcctaaaagctaccgatggggtttagttcattggtggatgggtattaaagatagcgagttcgatcacttttcgttcgttcaatttttctcaaactggccaaggtcattccactcgataatcgaagatgaagtagagttcaaccttgagcatgctgttgtcagcacgtctgaattacgactaaaagatcttcttggtcgattgtttttcggttcaattcggttacctgagcggaatcttcaacacaatatcatccttggtgagcttctctgctatttagaaaatcgtttatggcaagacaagggattaatcgccaacctcaaaatgaacgcgttagaggcgactgtaatgttaaattgtagcctcgatcagattgcatcaatggttgaacaacgcatcttgaagccaaatcgaaaaagcaagcccaacagccctcttgatgttaccgattatctatttcatttcggcgatattttctgtctttggttagctgagttccaaagcgatgagtttaaccgttcgttttatgtgtcgaggtggtaaatgcaaactctgaaagaactaatcgcatccaatcctgacgacttaacaactgaacttaagagagcatttcgtccactcacaccgcatattgcaattgatggtaatgaacttgacgcactgacgatattagtcaatttaaccgataagactgatgatcagaaagacctgctcgatcgagccaaatgcaagcaaaaacttcgagatgaaaaatggtgggctagctgcataaattgcgttaattacagacaaagccataacccaaaattcccggatatacgttctgaaggcgtgattcgaacccaagccctgggtgaattaccgagtttcctactctcgtcctcaaaaatcccaccataccattggtcatatagccatgattcaaaatacgtcaacaaaagcgcattcctcaccaatgagttttgttgggatggtgagatctcatgtttgggtgagcttcttaaagatgcagatcacccactttggaatactttgaaaaagttaggttgttctcaaaaaacttgcaaagcaatggcaaaacaactagctgatattactctcacgactatcaatgtcacactcgcaccaaattacctgactcaaatatctctccccgatagtgatacatcctacatttcactctctcctgttgcatcgctatcgatgcaaagccactttcatcagaggctccaagatgaaaatcggcatagcgcgataacgcggtttagccgaactaccaacatgggggtcactgcgatgacatgtggcggcgcatttagaatgttaaagtctggcgctaagttttccagcccccctcatcaccgattaaacagtaaacgaagttggttgacgtcagagcatgttcagtcattaaaacagtaccagcgcctcaacaaaagcctcatacctgaaaactctcggattgcactccgtagaaaatacaaaatcgagcttcaaaatatggtcagatcttggtttgcaatgcaagaccatacccttgattcgaacatacttatccaacatttgaatcatgacctatcttacttaggagccacaaaacgttttgcatacgatccagcgatgaccaagctctttactgagcttttgaaacgagagttatcaaattcaatcaataatggtgagcaacacactaatggatcgtttttagtcctaccgaatatcagggtttgtggcgcaacagctttaagctccccggtaacggtggggattccatcacttacagctttctttggcttcgttcacgcatttgaacggaatataaatcgcaccacctcatcgtttcgtgttgaatcctttgcgatatgcgtccatcaactacatgtcgagaagcgaggtttgacagcagagtttgtggaaaaaggcgacgggactatatccgctcccgcgacccgggatgactggcagtgtgatgtcgtatttagccttattttgaacaccaactttgctcaacatattgaccaagatacgttagttacatcactaccaaagcgattggctcggggttcagcaaaaattgcgattgatgactttaaacatatcaactcattctcgacattagaaacagcgatcgaatctctgccaatagaagctggtaggtggttatcactttacgcacagtcaaacaataatctaagtgatctattagcagccatgacagaggaccatcagctcatggcaagctgcgtcggttaccacttgttagaagagcccaaagataaaccaaactccctcagaggttacaaacacgctatcgccgagtgcatcattggactcattaactcaatcacctttagctcagagactgatcccaacacaatcttttggtcgctaaagaactatcaaaactacctagtggtacagccaaggagtatcaacgatgaaactaccgacaaatctagcctatgagcgctctatcgacccatcagatgtctgtttttttgtcgtctggcccgatgatagaaaaacacctttaacctacaattctcgtactctgctcgggcaaatggaagcggcatcattagcctatgatgtctcaggtcaaccaataaaaagtgccaccgctgaggcgttagctcaagggaaccctcatcaagttgatttctgccacgttccatacggtgcgagtcatattgaatgcagtttctccgtctcgttttcttctgaactacgtcaaccatataagtgtaactcaagcaaagttaaacaaacgctagtgcaattagtcgagctctacgaaacgaaaatcggctggactgagctagcaacccgatatttgatgaacatttgcaacggtaaatggctgtggaaaaatacccgtaaagcctattgctggaacattgtacttacaccttggccttggaacggggaaaaggttggatttgaagatattcgtactaactacacctcacggcaagactttaaaaataataaaaattggtctgctatagttgaaatgatcaaaaccgcattttctagtactgatgggctggcgatatttgaagtcagggccaccttgcacttgccaacgaatgctatggtgcggccaagccaagttttcacagaaaaagaaagtggcagtaaaagtaaatctaaaactcaaaacagtcgagtttttcagagtacaactattgatggtgaacgatcgccaatactaggggcctttaaaacgggagcagctattgcaaccattgacgactggtatcctgaagccactgagccactaagggtcggacggtttggggttcatcgcgaagatgtcacttgctaccgtcatccgtctaccggaaaagattttttctcgatattacaacaagcagagcactatattgaagtgttgagcgccaacaaaactcccgctcaagaaactatcaacgacatgcactttttaatggctaacctgattaagggtgggatgttccagcataaaggagactgactgtgaaatggtattataagacaatcacctttctgccagagttgtgcaacaacgagtcactggctgcaaagtgtctccgcgttctgcatggatttaactatcagtatgagacacgaaatatcggcgtttcatttccgctttggtgtgatgcaacggttggaaaaaagatttcatttgtcagcaagaacaagatagaactcgacttactacttaaacaacactatttcgtccaaatggaacaacttcaatactttcatatatccaacactgttctcgtcccagaagattgtacatacgtttcctttagacgctgtcaatctatagataagctcacagcagcagggctggcaaggaaaatcagacgcctggagaaacgtgctctatctagaggcgagcaatttgacccatcatcttttgctcaaaaagagcatactgcaatagcgcactaccactcacttggggagtccagcaaacagacgaaccgcaactttcgactcaatatcaggatgctctcggagcaaccccgtgaggggaactcgatttttagtagctatggcttatcaaattcagaaaactcgtttcagcctgtacccttaatctgacctttaataaggagatataccatggcgacaagtttacctacgccctcagcaattacgacttcggcgttagagtatgcattccatactcccgctcgcaatctaacgaaatctcgcggaaaaaacattcatcgttatgtcagtgtaaagatgagtaagaggattacggtagaatctactctagagtgtgatgcctgctatcactttgattttgagccaagtattgttcgcttttgcgctcaaccgattcgatttttatattatctcaatggtcagtctcactcctatgttcctgactttctagttcaatttgataccaacgagtttgttctatatgaagtaaagtcagcttatgctaagaacaaacctgattttgatgttgaatgggaggcgaaagtaaaagcagcaactgaactagggctagaattggagcttgttgaagagagtgatattagggatacggttgtattaaataatcttaagcgcatgcatcgttatgcttcgaaagatgagctgaataacgtacataactctctcttaaaaataataaagtacaatggcgcccaatctgcaagatgcttgggagaacagttgggtttaaaaggccgaactgttttaccaattttgtgcgatttgctgtcaaggtgtttactcgatacacgtttggataagcctctatctcttgaatctcgatttgagttggccagttatggctaagaaagggttctcaagtttccatagaaaagcagtctcttcccaagatacgcttgaatcgatagagcttgtctctagcgctaattgtctagaaagtgttacgtatcaagatatatcagcatttcccgaaacaattgcggtagagattaatttccgattaagcattcttcgctttttagcgcgaaagtgcgaaaccattgtggccaaatcaattgaaccacatcgtgtagagctacagcaaaactatagtagaaaaatacccagtgcaataacgatatatcgatggtggcttgcttttcgaaaatcagactacaaccccattagcttagcacctaatatcaaggatagaggtaatagagagacaaaagtgtcaacagttgttgattctattatggaacaggcagttgaaagagttatatctggacgaaaagtcaatgttagctctgcatataaacgtgttcgacgaaaagttcgtcaatacaatctaactcatggaacgaaatacacgtatcctaagtacgaatctgtaagaaagcgagtaaaaaagaaaaccccatttgagttattagccgcagggaaaggggagagagtagctaagagagagtttcgccgaatgggaaaaaagatcctcacgtctagcgtgctagagagggttgaaatagatcacactgtcgttgacctttttgcagtacacgaagagtatcgaatcccattgggccgaccttggcttactcaattggttgattgttacagtaaagctgtaatcggtttttatttaggtttcgagcctcctagctatgtgtcggtttcccttgcacttaagaatgcaatacaacgcaaagatgacttaatctcctcgtatgaatcgatcgagaatgaatggctatgttatggcatcccagacctactcgtaactgataatggtaaagagtttttgtcgaaagcatttgatcaagcatgtgaatcactattgatcaatgtgcatcaaaataaagttgagacgcccgacaacaaacctcatgttgaacgtaactacgggactattaatacttctctgttagacgatttacctgggaaatccttcagccagtaccttcaaagagaagggtacgactctgtgggagaagctacccttacactcaatgagattagagaaatttacttaatttggttggtggatatttatcataaaaaacccaatcagagaggcactaattgtcctaatgttgcgtggaaaaagggttgtcaagaatgggaaccagaggagttctctggttctaaagacgaattagactttaaatttgctattgttgattacaaacaacttactaaagtagggataactgtctacaaagaactgagttatagcaatgaccgtttagctgaatatagagggaagaaaggaaaccataaagttcagttcaagtataaccctgagtgtatggcagttatttgggtgttggatgaggatatgaatgagtactttacagttaatgcgattgactacgaatatgcaagtagagtatcactttggcaacataaatataacatgaaatatcaagcagaactaaattcagcagaatatgatgaggacaaggaaattgatgcagaaataaaaattgaagaaatcgcagatcgttcaattgttaagactaacaaaatcagagctcggaggcgtggcgctaggcatcaagagaatagcgcaagggctaagtcaatcagtaatgcgaacccggcctcgatacaaaaacatgaagatgaaatcgttagtgcagataatgacgattgggatattgattatgtctgagaaatcgtcaaatgagtgaaacgcgtgaggctcgtatatcaagagctaaaagggcatttgtatccacaccgagcgttaggaaaatcttgagttacatggatagatgtagagatctatcagacctagagtctgagcctacatgcatgatggtctatggtgcttcgggtgtaggtaaaacgaccgtcatcaagaaatacttaaatcaaaacagaagagagtccgaagccgggggcgatataataccggttttgcatattgagttgccagacaatgcgaagccagtagatgcagcaagggaattgctggttgaaatgggtgacccgctagcactttatgaaactgacttagctagattgacgaaaagactgactgaattaatccctgcggtcggcgtgaagctgattattatcgatgagttccaacatttggtggaagaaaggtcaaatcgggttcttacccaagtaggtaattggctaaaaatgatacttaacaaaacgaaatgtccaattgttatatttggtatgccatactcaaaagttgtactgcaagcaaactcgcaacttcacgggcgattttccattcaggttgaactgcgcccctttagctaccagggaggtagaggtgtatttaaaacttttttggaataccttgataaagccctaccttttgaaaaacaggctggcttagccaacgaaagtttgcagaaaaaattgtatgcattctctcagggaaacatgcgttcgttgagaaaccttatttatcaagcatctatcgaagcaattgataatcagcatgagacgataaccgaagaagatttcgtttttgcatcgaagttgacatcgggcgataaacccaactcatggaaaaatccttttgaggagggtgttgaggtaacagaagatatgttacgaccgccaccaaaagatattggttgggaggactatttgagacattcaaccccgagagtgagtaaaccaggtagaaataaaaactttttcgaataacctaggctgctgcgctgctgccaccgctgagcaataactagcataaccccttggggcctctaaacgggtcttgaggggttttttgctgaaacctcaggcatttgagaagcacacggtcacactgcttccggtagtcaataaaccggtaaaccagcaatagacataagcggctatttaacgaccctgccctgaaccgacgaccgggtcatcgtggccggatcttgcggcccctcggcttgaacgaattgttagacattatttgccgactaccttggtgatctcgcctttcacgtagtggacaaattcttccaactgatctgcgcgcgaggccaagcgatcttcttcttgtccaagataagcctgtctagcttcaagtatgacgggctgatactgggccggcaggcgctccattgcccagtcggcagcgacatccttcggcgcgattttgccggttactgcgctgtaccaaatgcgggacaacgtaagcactacatttcgctcatcgccagcccagtcgggcggcgagttccatagcgttaaggtttcatttagcgcctcaaatagatcctgttcaggaaccggatcaaagagttcctccgccgctggacctaccaaggcaacgctatgttctcttgcttttgtcagcaagatagccagatcaatgtcgatcgtggctggctcgaagatacctgcaagaatgtcattgcgctgccattctccaaattgcagttcgcgcttagctggataacgccacggaatgatgtcgtcgtgcacaacaatggtgacttctacagcgcggagaatctcgctctctccaggggaagccgaagtttccaaaaggtcgttgatcaaagctcgccgcgttgtttcatcaagccttacggtcaccgtaaccagcaaatcaatatcactgtgtggcttcaggccgccatccactgcggagccgtacaaatgtacggccagcaacgtcggttcgagatggcgctcgatgacgccaactacctctgatagttgagtcgatacttcggcgatcaccgcttccctcatactcttcctttttcaatattattgaagcatttatcagggttattgtctcatgagcggatacatatttgaatgtatttagaaaaataaacaaatagctagctcactcggtcgctacgctccgggcgtgagactgcggcgggcgctgcggacacatacaaagttacccacagattccgtggataagcaggggactaacatgtgaggcaaaacagcagggccgcgccggtggcgtttttccataggctccgccctcctgccagagttcacataaacagacgcttttccggtgcatctgtgggagccgtgaggctcaaccatgaatctgacagtacgggcgaaacccgacaggacttaaagatccccaccgtttccggcgggtcgctccctcttgcgctctcctgttccgaccctgccgtttaccggatacctgttccgcctttctcccttacgggaagtgtggcgctttctcatagctcacacactggtatctcggctcggtgtaggtcgttcgctccaagctgggctgtaagcaagaactccccgttcagcccgactgctgcgccttatccggtaactgttcacttgagtccaacccggaaaagcacggtaaaacgccactggcagcagccattggtaactgggagttcgcagaggatttgtttagctaaacacgcggttgctcttgaagtgtgcgccaaagtccggctacactggaaggacagatttggttgctgtgctctgcgaaagccagttaccacggttaagcagttccccaactgacttaaccttcgatcaaaccacctccccaggtggttttttcgtttacagggcaaaagattacgcgcagaaaaaaaggatctcaagaagatcctttgatcttttctactgaaccgctctagatttcagtgcaatttatctcttcaaatgtagcacctgaagtcagccccatacgatataagttgtaattctcatgttagtcatgccccgcgcccaccggaaggagctgactgggttgaaggctctcaagggcatcggtcgagatcccggtgcctaatgagtgagctaacttacattaattgcgttgcgctcactgcccgctttccagtcgggaaacctgtcgtgccagctgcattaatgaatcggccaacgcgcggggagaggcggtttgcgtattgggcgccagggtggtttttcttttcaccagtgagacgggcaacagctgattgcccttcaccgcctggccctgagagagttgcagcaagcggtccacgctggtttgccccagcaggcgaaaatcctgtttgatggtggttaacggcgggatataacatgagctgtcttcggtatcgtcgtatcccactaccgagatgtccgcaccaacgcgcagcccggactcggtaatggcgcgcattgcgcccagcgccatctgatcgttggcaaccagcatcgcagtgggaacgatgccctcattcagcatttgcatggtttgttgaaaaccggacatggcactccagtcgccttcccgttccgctatcggctgaatttgattgcgagtgagatatttatgccagccagccagacgcagacgcgccgagacagaacttaatgggcccgctaacagcgcgatttgctggtgacccaatgcgaccagatgctccacgcccagtcgcgtaccgtcttcatgggagaaaataatactgttgatgggtgtctggtcagagacatcaagaaataacgccggaacattagtgcaggcagcttccacagcaatggcatcctggtcatccagcggatagttaatgatcagcccactgacgcgttgcgcgagaagattgtgcaccgccgctttacaggcttcgacgccgcttcgttctaccatcgacaccaccacgctggcacccagttgatcggcgcgagatttaatcgccgcgacaatttgcgacggcgcgtgcagggccagactggaggtggcaacgccaatcagcaacgactgtttgcccgccagttgttgtgccacgcggttgggaatgtaattcagctccgccatcgccgcttccactttttcccgcgttttcgcagaaacgtggctggcctggttcaccacgcgggaaacggtctgataagagacaccggcatactctgcgacatcgtataacgttactggtttcac

SEQ ID NO: 13 - DNA, 11812 bp, artificial sequence
  Synthetic
attcaccaccctgaattgactctcttccgggcgctatcatgccataccgcgaaaggttttgcgccattcgatggtgtccgggatctcgacgctctcccttatgcgactcctgcattaggaaattaatacgactcactataggggaattgtgagcggataacaattcccctgtagaaataattttgtttaactttaataaggagatataccatgggtgaactgccgagtaggtagctgataacagtacagcgcggctgaaatcatcattaaagcggtgaactgccgagtaggtagctgataacggatccgaattcgagcgaaggagatatacatatgtttttgcaaagacctaaaccttacagcgatgaaagtttagaaagtttctttatccgagtggctaacaaaaatggctacggtgatgtccatcgcttcctagaagccactaaacgattccttcaagacattgaccataatggctatcaaacctttccgactgatataactcggataaacccatactcagctaaaaacagttccagcgcacgaactgcgtcattcctgaaacttgcacaattgacatttaatgaaccgccagagctacttgggttggcaattaacagaacaaacatgaaatactcgccgtcaactagcgcggttgttagaggtgcagaagtctttcctcgcagtttactacggacgcactccatcccctgctgtcctttgtgtctgcgagaaaatggctacgcctcctacctttggcactttcaggggtacgaatactgccacagccataacgtacctttaattaccacttgtagctgtggtaaggagtttgactaccgagtatctgggttaaagggcatttgctgcaaatgcaaggagcctatcaccttaaccagcagggagaacggtcatgaggcagcgtgtactgtttcaaactggcttgctggccatgaatctaaacctctgccaaatcttcctaaaagctaccgatggggtttagttcattggtggatgggtattaaagatagcgagttcgatcacttttcgttcgttcaatttttctcaaactggccaaggtcattccactcgataatcgaagatgaagtagagttcaaccttgagcatgctgttgtcagcacgtctgaattacgactaaaagatcttcttggtcgattgtttttcggttcaattcggttacctgagcggaatcttcaacacaatatcatccttggtgagcttctctgctatttagaaaatcgtttatggcaagacaagggattaatcgccaacctcaaaatgaacgcgttagaggcgactgtaatgttaaattgtagcctcgatcagattgcatcaatggttgaacaacgcatcttgaagccaaatcgaaaaagcaagcccaacagccctcttgatgttaccgattatctatttcatttcggcgatattttctgtctttggttagctgagttccaaagcgatgagtttaaccgttcgttttatgtgtcgaggtggtaaatgcaaactctgaaagaactaatcgcatccaatcctgacgacttaacaactgaacttaagagagcatttcgtccactcacaccgcatattgcaattgatggtaatgaacttgacgcactgacgatattagtcaatttaaccgataagactgatgatcagaaagacctgctcgatcgagccaaatgcaagcaaaaacttcgagatgaaaaatggtgggctagctgcataaattgcgttaattacagacaaagccataacccaaaattcccggatatacgttctgaaggcgtgattcgaacccaagccctgggtgaattaccgagtttcctactctcgtcctcaaaaatcccaccataccattggtcatatagccatgattcaaaatacgtcaacaaaagcgcattcctcaccaatgagttttgttgggatggtgagatctcatgtttgggtgagcttcttaaagatgcagatcacccactttggaatactttgaaaaagttaggttgttctcaaaaaacttgcaaagcaatggcaaaacaactagctgatattactctcacgactatcaatgtcacactcgcaccaaattacctgactcaaatatctctccccgatagtgatacatcctacatttcactctctcctgttgcatcgctatcgatgcaaagccactttcatcagaggctccaagatgaaaatcggcatagcgcgataacgcggtttagccgaactaccaacatgggggtcactgcgatgacatgtggcggcgcatttagaatgttaaagtctggcgctaagttttccagcccccctcatcaccgattaaacagtaaacgaagttggttgacgtcagagcatgttcagtcattaaaacagtaccagcgcctcaacaaaagcctcatacctgaaaactctcggattgcactccgtagaaaatacaaaatcgagcttcaaaatatggtcagatcttggtttgcaatgcaagaccatacccttgattcgaacatacttatccaacatttgaatcatgacctatcttacttaggagccacaaaacgttttgcatacgatccagcgatgaccaagctctttactgagcttttgaaacgagagttatcaaattcaatcaataatggtgagcaacacactaatggatcgtttttagtcctaccgaatatcagggtttgtggcgcaacagctttaagctccccggtaacggtggggattccatcacttacagctttctttggcttcgttcacgcatttgaacggaatataaatcgcaccacctcatcgtttcgtgttgaatcctttgcgatatgcgtccatcaactacatgtcgagaagcgaggtttgacagcagagtttgtggaaaaaggcgacgggactatatccgctcccgcgacccgggatgactggcagtgtgatgtcgtatttagccttattttgaacaccaactttgctcaacatattgaccaagatacgttagttacatcactaccaaagcgattggctcggggttcagcaaaaattgcgattgatgactttaaacatatcaactcattctcgacattagaaacagcgatcgaatctctgccaatagaagctggtaggtggttatcactttacgcacagtcaaacaataatctaagtgatctattagcagccatgacagaggaccatcagctcatggcaagctgcgtcggttaccacttgttagaagagcccaaagataaaccaaactccctcagaggttacaaacacgctatcgccgagtgcatcattggactcattaactcaatcacctttagctcagagactgatcccaacacaatcttttggtcgctaaagaactatcaaaactacctagtggtacagccaaggagtatcaacgatgaaactaccgacaaatctagcctatgagcgctctatcgacccatcagatgtctgtttttttgtcgtctggcccgatgatagaaaaacacctttaacctacaattctcgtactctgctcgggcaaatggaagcggcatcattagcctatgatgtctcaggtcaaccaataaaaagtgccaccgctgaggcgttagctcaagggaaccctcatcaagttgatttctgccacgttccatacggtgcgagtcatattgaatgcagtttctccgtctcgttttcttctgaactacgtcaaccatataagtgtaactcaagcaaagttaaacaaacgctagtgcaattagtcgagctctacgaaacgaaaatcggctggactgagctagcaacccgatatttgatgaacatttgcaacggtaaatggctgtggaaaaatacccgtaaagcctattgctggaacattgtacttacaccttggccttggaacggggaaaaggttggatttgaagatattcgtactaactacacctcacggcaagactttaaaaataataaaaattggtctgctatagttgaaatgatcaaaaccgcattttctagtactgatgggctggcgatatttgaagtcagggccaccttgcacttgccaacgaatgctatggtgcggccaagccaagttttcacagaaaaagaaagtggcagtaaaagtaaatctaaaactcaaaacagtcgagtttttcagagtacaactattgatggtgaacgatcgccaatactaggggcctttaaaacgggagcagctattgcaaccattgacgactggtatcctgaagccactgagccactaagggtcggacggtttggggttcatcgcgaagatgtcacttgctaccgtcatccgtctaccggaaaagattttttctcgatattacaacaagcagagcactatattgaagtgttgagcgccaacaaaactcccgctcaagaaactatcaacgacatgcactttttaatggctaacctgattaagggtgggatgttccagcataaaggagactgactgtgaaatggtattataagacaatcacctttctgccagagttgtgcaacaacgagtcactggctgcaaagtgtctccgcgttctgcatggatttaactatcagtatgagacacgaaatatcggcgtttcatttccgctttggtgtgatgcaacggttggaaaaaagatttcatttgtcagcaagaacaagatagaactcgacttactacttaaacaacactatttcgtccaaatggaacaacttcaatactttcatatatccaacactgttctcgtcccagaagattgtacatacgtttcctttagacgctgtcaatctatagataagctcacagcagcagggctggcaaggaaaatcagacgcctggagaaacgtgctctatctagaggcgagcaatttgacccatcatcttttgctcaaaaagagcatactgcaatagcgcactaccactcacttggggagtccagcaaacagacgaaccgcaactttcgactcaatatcaggatgctctcggagcaaccccgtgaggggaactcgatttttagtagctatggcttatcaaattcagaaaactcgtttcagcctgtacccttaatctgacctttaataaggagatataccatggcgacaagtttacctacgccctcagcaattacgacttcggcgttagagtatgcattccatactcccgctcgcaatctaacgaaatctcgcggaaaaaacattcatcgttatgtcagtgtaaagatgagtaagaggattacggtagaatctactctagagtgtgatgcctgctatcactttgattttgagccaagtattgttcgcttttgcgctcaaccgattcgatttttatattatctcaatggtcagtctcactcctatgttcctgactttctagttcaatttgataccaacgagtttgttctatatgaagtaaagtcagcttatgctaagaacaaacctgattttgatgttgaatgggaggcgaaagtaaaagcagcaactgaactagggctagaattggagcttgttgaagagagtgatattagggatacggttgtattaaataatcttaagcgcatgcatcgttatgcttcgaaagatgagctgaataacgtacataactctctcttaaaaataataaagtacaatggcgcccaatctgcaagatgcttgggagaacagttgggtttaaaaggccgaactgttttaccaattttgtgcgatttgctgtcaaggtgtttactcgatacacgtttggataagcctctatctcttgaatctcgatttgagttggccagttatggctaagaaagggttctcaagtttccatagaaaagcagtctcttcccaagatacgcttgaatcgatagagcttgtctctagcgctaattgtctagaaagtgttacgtatcaagatatatcagcatttcccgaaacaattgcggtagagattaatttccgattaagcattcttcgctttttagcgcgaaagtgcgaaaccattgtggccaaatcaattgaaccacatcgtgtagagctacagcaaaactatagtagaaaaatacccagtgcaataacgatatatcgatggtggcttgcttttcgaaaatcagactacaaccccattagcttagcacctaatatcaaggatagaggtaatagagagacaaaagtgtcaacagttgttgattctattatggaacaggcagttgaaagagttatatctggacgaaaagtcaatgttagctctgcatataaacgtgttcgacgaaaagttcgtcaatacaatctaactcatggaacgaaatacacgtatcctaagtacgaatctgtaagaaagcgagtaaaaaagaaaaccccatttgagttattagccgcagggaaaggggagagagtagctaagagagagtttcgccgaatgggaaaaaagatcctcacgtctagcgtgctagagagggttgaaatagatcacactgtcgttgacctttttgcagtacacgaagagtatcgaatcccattgggccgaccttggcttactcaattggttgattgttacagtaaagctgtaatcggtttttatttaggtttcgagcctcctagctatgtgtcggtttcccttgcacttaagaatgcaatacaacgcaaagatgacttaatctcctcgtatgaatcgatcgagaatgaatggctatgttatggcatcccagacctactcgtaactgataatggtaaagagtttttgtcgaaagcatttgatcaagcatgtgaatcactattgatcaatgtgcatcaaaataaagttgagacgcccgacaacaaacctcatgttgaacgtaactacgggactattaatacttctctgttagacgatttacctgggaaatccttcagccagtaccttcaaagagaagggtacgactctgtgggagaagctacccttacactcaatgagattagagaaatttacttaatttggttggtggatatttatcataaaaaacccaatcagagaggcactaattgtcctaatgttgcgtggaaaaagggttgtcaagaatgggaaccagaggagttctctggttctaaagacgaattagactttaaatttgctattgttgattacaaacaacttactaaagtagggataactgtctacaaagaactgagttatagcaatgaccgtttagctgaatatagagggaagaaaggaaaccataaagttcagttcaagtataaccctgagtgtatggcagttatttgggtgttggatgaggatatgaatgagtactttacagttaatgcgattgactacgaatatgcaagtagagtatcactttggcaacataaatataacatgaaatatcaagcagaactaaattcagcagaatatgatgaggacaaggaaattgatgcagaaataaaaattgaagaaatcgcagatcgttcaattgttaagactaacaaaatcagagctcggaggcgtggcgctaggcatcaagagaatagcgcaagggctaagtcaatcagtaatgcgaacccggcctcgatacaaaaacatgaagatgaaatcgttagtgcagataatgacgattgggatattgattatgtctgagaaatcgtcaaatgagtgaaacgcgtgaggctcgtatatcaagagctaaaagggcatttgtatccacaccgagcgttaggaaaatcttgagttacatggatagatgtagagatctatcagacctagagtctgagcctacatgcatgatggtctatggtgcttcgggtgtaggtaaaacgaccgtcatcaagaaatacttaaatcaaaacagaagagagtccgaagccgggggcgatataataccggttttgcatattgagttgccagacaatgcgaagccagtagatgcagcaagggaattgctggttgaaatgggtgacccgctagcactttatgaaactgacttagctagattgacgaaaagactgactgaattaatccctgcggtcggcgtgaagctgattattatcgatgagttccaacatttggtggaagaaaggtcaaatcgggttcttacccaagtaggtaattggctaaaaatgatacttaacaaaacgaaatgtccaattgttatatttggtatgccatactcaaaagttgtactgcaagcaaactcgcaacttcacgggcgattttccattcaggttgaactgcgcccctttagctaccagggaggtagaggtgtatttaaaacttttttggaataccttgataaagccctaccttttgaaaaacaggctggcttagccaacgaaagtttgcagaaaaaattgtatgcattctctcagggaaacatgcgttcgttgagaaaccttatttatcaagcatctatcgaagcaattgataatcagcatgagacgataaccgaagaagatttcgtttttgcatcgaagttgacatcgggcgataaacccaactcatggaaaaatccttttgaggagggtgttgaggtaacagaagatatgttacgaccgccaccaaaagatattggttgggaggactatttgagacattcaaccccgagagtgagtaaaccaggtagaaataaaaactttttcgaataacctaggctgctgcgctgctgccaccgctgagcaataactagcataaccccttggggcctctaaacgggtcttgaggggttttttgctgaaacctcaggcatttgagaagcacacggtcacactgcttccggtagtcaataaaccggtaaaccagcaatagacataagcggctatttaacgaccctgccctgaaccgacgaccgggtcatcgtggccggatcttgcggcccctcggcttgaacgaattgttagacattatttgccgactaccttggtgatctcgcctttcacgtagtggacaaattcttccaactgatctgcgcgcgaggccaagcgatcttcttcttgtccaagataagcctgtctagcttcaagtatgacgggctgatactgggccggcaggcgctccattgcccagtcggcagcgacatccttcggcgcgattttgccggttactgcgctgtaccaaatgcgggacaacgtaagcactacatttcgctcatcgccagcccagtcgggcggcgagttccatagcgttaaggtttcatttagcgcctcaaatagatcctgttcaggaaccggatcaaagagttcctccgccgctggacctaccaaggcaacgctatgttctcttgcttttgtcagcaagatagccagatcaatgtcgatcgtggctggctcgaagatacctgcaagaatgtcattgcgctgccattctccaaattgcagttcgcgcttagctggataacgccacggaatgatgtcgtcgtgcacaacaatggtgacttctacagcgcggagaatctcgctctctccaggggaagccgaagtttccaaaaggtcgttgatcaaagctcgccgcgttgtttcatcaagccttacggtcaccgtaaccagcaaatcaatatcactgtgtggcttcaggccgccatccactgcggagccgtacaaatgtacggccagcaacgtcggttcgagatggcgctcgatgacgccaactacctctgatagttgagtcgatacttcggcgatcaccgcttccctcatactcttcctttttcaatattattgaagcatttatcagggttattgtctcatgagcggatacatatttgaatgtatttagaaaaataaacaaatagctagctcactcggtcgctacgctccgggcgtgagactgcggcgggcgctgcggacacatacaaagttacccacagattccgtggataagcaggggactaacatgtgaggcaaaacagcagggccgcgccggtggcgtttttccataggctccgccctcctgccagagttcacataaacagacgcttttccggtgcatctgtgggagccgtgaggctcaaccatgaatctgacagtacgggcgaaacccgacaggacttaaagatccccaccgtttccggcgggtcgctccctcttgcgctctcctgttccgaccctgccgtttaccggatacctgttccgcctttctcccttacgggaagtgtggcgctttctcatagctcacacactggtatctcggctcggtgtaggtcgttcgctccaagctgggctgtaagcaagaactccccgttcagcccgactgctgcgccttatccggtaactgttcacttgagtccaacccggaaaagcacggtaaaacgccactggcagcagccattggtaactgggagttcgcagaggatttgtttagctaaacacgcggttgctcttgaagtgtgcgccaaagtccggctacactggaaggacagatttggttgctgtgctctgcgaaagccagttaccacggttaagcagttccccaactgacttaaccttcgatcaaaccacctccccaggtggttttttcgtttacagggcaaaagattacgcgcagaaaaaaaggatctcaagaagatcctttgatcttttctactgaaccgctctagatttcagtgcaatttatctcttcaaatgtagcacctgaagtcagccccatacgatataagttgtaattctcatgttagtcatgccccgcgcccaccggaaggagctgactgggttgaaggctctcaagggcatcggtcgagatcccggtgcctaatgagtgagctaacttacattaattgcgttgcgctcactgcccgctttccagtcgggaaacctgtcgtgccagctgcattaatgaatcggccaacgcgcggggagaggcggtttgcgtattgggcgccagggtggtttttcttttcaccagtgagacgggcaacagctgattgcccttcaccgcctggccctgagagagttgcagcaagcggtccacgctggtttgccccagcaggcgaaaatcctgtttgatggtggttaacggcgggatataacatgagctgtcttcggtatcgtcgtatcccactaccgagatgtccgcaccaacgcgcagcccggactcggtaatggcgcgcattgcgcccagcgccatctgatcgttggcaaccagcatcgcagtgggaacgatgccctcattcagcatttgcatggtttgttgaaaaccggacatggcactccagtcgccttcccgttccgctatcggctgaatttgattgcgagtgagatatttatgccagccagccagacgcagacgcgccgagacagaacttaatgggcccgctaacagcgcgatttgctggtgacccaatgcgaccagatgctccacgcccagtcgcgtaccgtcttcatgggagaaaataatactgttgatgggtgtctggtcagagacatcaagaaataacgccggaacattagtgcaggcagcttccacagcaatggcatcctggtcatccagcggatagttaatgatcagcccactgacgcgttgcgcgagaagattgtgcaccgccgctttacaggcttcgacgccgcttcgttctaccatcgacaccaccacgctggcacccagttgatcggcgcgagatttaatcgccgcgacaatttgcgacggcgcgtgcagggccagactggaggtggcaacgccaatcagcaacgactgtttgcccgccagttgttgtgccacgcggttgggaatgtaattcagctccgccatcgccgcttccactttttcccgcgttttcgcagaaacgtggctggcctggttcaccacgcgggaaacggtctgataagagacaccggcatactctgcgacatcgtataacgttactggtttcac

SEQ ID NO: 14 - DNA, 12022 bp, artificial sequence
  Synthetic
ggcagcttccacagcaatggcatcctggtcatccagcggatagttaatgatcagcccactgacgcgttgcgcgagaagattgtgcaccgccgctttacaggcttcgacgccgcttcgttctaccatcgacaccaccacgctggcacccagttgatcggcgcgagatttaatcgccgcgacaatttgcgacggcgcgtgcagggccagactggaggtggcaacgccaatcagcaacgactgtttgcccgccagttgttgtgccacgcggttgggaatgtaattcagctccgccatcgccgcttccactttttcccgcgttttcgcagaaacgtggctggcctggttcaccacgcgggaaacggtctgataagagacaccggcatactctgcgacatcgtataacgttactggtttcacattcaccaccctgaattgactctcttccgggcgctatcatgccataccgcgaaaggttttgcgccattcgatggtgtccgggatctcgacgctctcccttatgcgactcctgcattaggaaattaatacgactcactataggggaattgtgagcggataacaattcccctgtagaaataattttgtttaactttaataaggagatataccatgggcagcagccatcaccatcatcaccacagccaggatccgaattcgagctcggtataaggagatataccatggcgacaagtttacctacgccctcagcaattacgacttcggcgttagagtatgcattccatactcccgctcgcaatctaacgaaatctcgcggaaaaaacattcatcgttatgtcagtgtaaagatgagtaagaggattacggtagaatctactctagagtgtgatgcctgctatcactttgattttgagccaagtattgttcgcttttgcgctcaaccgattcgatttttatattatctcaatggtcagtctcactcctatgttcctgactttctagttcaatttgataccaacgagtttgttctatatgaagtaaagtcagcttatgctaagaacaaacctgattttgatgttgaatgggaggcgaaagtaaaagcagcaactgaactagggctagaattggagcttgttgaagagagtgatattagggatacggttgtattaaataatcttaagcgcatgcatcgttatgcttcgaaagatgagctgaataacgtacataactctctcttaaaaataataaagtacaatggcgcccaatctgcaagatgcttgggagaacagttgggtttaaaaggccgaactgttttaccaattttgtgcgatttgctgtcaaggtgtttactcgatacacgtttggataagcctctatctcttgaatctcgatttgagttggccagttatggctaagaaagggttctcaagtttccatagaaaagcagtctcttcccaagatacgcttgaatcgatagagcttgtctctagcgctaattgtctagaaagtgttacgtatcaagatatatcagcatttcccgaaacaattgcggtagagattaatttccgattaagcattcttcgctttttagcgcgaaagtgcgaaaccattgtggccaaatcaattgaaccacatcgtgtagagctacagcaaaactatagtagaaaaatacccagtgcaataacgatatatcgatggtggcttgcttttcgaaaatcagactacaaccccattagcttagcacctaatatcaaggatagaggtaatagagagacaaaagtgtcaacagttgttgattctattatggaacaggcagttgaaagagttatatctggacgaaaagtcaatgttagctctgcatataaacgtgttcgacgaaaagttcgtcaatacaatctaactcatggaacgaaatacacgtatcctaagtacgaatctgtaagaaagcgagtaaaaaagaaaaccccatttgagttattagccgcagggaaaggggagagagtagctaagagagagtttcgccgaatgggaaaaaagatcctcacgtctagcgtgctagagagggttgaaatagatcacactgtcgttgacctttttgcagtacacgaagagtatcgaatcccattgggccgaccttggcttactcaattggttgattgttacagtaaagctgtaatcggtttttatttaggtttcgagcctcctagctatgtgtcggtttcccttgcacttaagaatgcaatacaacgcaaagatgacttaatctcctcgtatgaatcgatcgagaatgaatggctatgttatggcatcccagacctactcgtaactgataatggtaaagagtttttgtcgaaagcatttgatcaagcatgtgaatcactattgatcaatgtgcatcaaaataaagttgagacgcccgacaacaaacctcatgttgaacgtaactacgggactattaatacttctctgttagacgatttacctgggaaatccttcagccagtaccttcaaagagaagggtacgactctgtgggagaagctacccttacactcaatgagattagagaaatttacttaatttggttggtggatatttatcataaaaaacccaatcagagaggcactaattgtcctaatgttgcgtggaaaaagggttgtcaagaatgggaaccagaggagttctctggttctaaagacgaattagactttaaatttgctattgttgattacaaacaacttactaaagtagggataactgtctacaaagaactgagttatagcaatgaccgtttagctgaatatagagggaagaaaggaaaccataaagttcagttcaagtataaccctgagtgtatggcagttatttgggtgttggatgaggatatgaatgagtactttacagttaatgcgattgactacgaatatgcaagtagagtatcactttggcaacataaatataacatgaaatatcaagcagaactaaattcagcagaatatgatgaggacaaggaaattgatgcagaaataaaaattgaagaaatcgcagatcgttcaattgttaagactaacaaaatcagagctcggaggcgtggcgctaggcatcaagagaatagcgcaagggctaagtcaatcagtaatgcgaacccggcctcgatacaaaaacatgaagatgaaatcgttagtgcagataatgacgattgggatattgattatgtctgagaaatcgtcaaatgagtgaaacgcgtgaggctcgtatatcaagagctaaaagggcatttgtatccacaccgagcgttaggaaaatcttgagttacatggatagatgtagagatctatcagacctagagtctgagcctacatgcatgatggtctatggtgcttcgggtgtaggtaaaacgaccgtcatcaagaaatacttaaatcaaaacagaagagagtccgaagccgggggcgatataataccggttttgcatattgagttgccagacaatgcgaagccagtagatgcagcaagggaattgctggttgaaatgggtgacccgctagcactttatgaaactgacttagctagattgacgaaaagactgactgaattaatccctgcggtcggcgtgaagctgattattatcgatgagttccaacatttggtggaagaaaggtcaaatcgggttcttacccaagtaggtaattggctaaaaatgatacttaacaaaacgaaatgtccaattgttatatttggtatgccatactcaaaagttgtactgcaagcaaactcgcaacttcacgggcgattttccattcaggttgaactgcgcccctttagctaccagggaggtagaggtgtatttaaaacttttttggaataccttgataaagccctaccttttgaaaaacaggctggcttagccaacgaaagtttgcagaaaaaattgtatgcattctctcagggaaacatgcgttcgttgagaaaccttatttatcaagcatctatcgaagcaattgataatcagcatgagacgataaccgaagaagatttcgtttttgcatcgaagttgacatcgggcgataaacccaactcatggaaaaatccttttgaggagggtgttgaggtaacagaagatatgttacgaccgccaccaaaagatattggttgggaggactatttgagacattcaaccccgagagtgagtaaaccaggtagaaataaaaactttttcgaataacctaggctgctgccctgcaggtcgacaagcttgcggccgcataatgcttaagtcgaacagaaagtaatcgtattgtacacggccgcataatcgaaattaatacgactcactataggggaattgtgagcggataacaattccccatcttagtatattagttaagtataagaaggagatatacatatgtttttgcaaagacctaaaccttacagcgatgaaagtttagaaagtttctttatccgagtggctaacaaaaatggctacggtgatgtccatcgcttcctagaagccactaaacgattccttcaagacattgaccataatggctatcaaacctttccgactgatataactcggataaacccatactcagctaaaaacagttccagcgcacgaactgcgtcattcctgaaacttgcacaattgacatttaatgaaccgccagagctacttgggttggcaattaacagaacaaacatgaaatactcgccgtcaactagcgcggttgttagaggtgcagaagtctttcctcgcagtttactacggacgcactccatcccctgctgtcctttgtgtctgcgagaaaatggctacgcctcctacctttggcactttcaggggtacgaatactgccacagccataacgtacctttaattaccacttgtagctgtggtaaggagtttgactaccgagtatctgggttaaagggcatttgctgcaaatgcaaggagcctatcaccttaaccagcagggagaacggtcatgaggcagcgtgtactgtttcaaactggcttgctggccatgaatctaaacctctgccaaatcttcctaaaagctaccgatggggtttagttcattggtggatgggtattaaagatagcgagttcgatcacttttcgttcgttcaatttttctcaaactggccaaggtcattccactcgataatcgaagatgaagtagagttcaaccttgagcatgctgttgtcagcacgtctgaattacgactaaaagatcttcttggtcgattgtttttcggttcaattcggttacctgagcggaatcttcaacacaatatcatccttggtgagcttctctgctatttagaaaatcgtttatggcaagacaagggattaatcgccaacctcaaaatgaacgcgttagaggcgactgtaatgttaaattgtagcctcgatcagattgcatcaatggttgaacaacgcatcttgaagccaaatcgaaaaagcaagcccaacagccctcttgatgttaccgattatctatttcatttcggcgatattttctgtctttggttagctgagttccaaagcgatgagtttaaccgttcgttttatgtgtcgaggtggtaaatgcaaactctgaaagaactaatcgcatccaatcctgacgacttaacaactgaacttaagagagcatttcgtccactcacaccgcatattgcaattgatggtaatgaacttgacgcactgacgatattagtcaatttaaccgataagactgatgatcagaaagacctgctcgatcgagccaaatgcaagcaaaaacttcgagatgaaaaatggtgggctagctgcataaattgcgttaattacagacaaagccataacccaaaattcccggatatacgttctgaaggcgtgattcgaacccaagccctgggtgaattaccgagtttcctactctcgtcctcaaaaatcccaccataccattggtcatatagccatgattcaaaatacgtcaacaaaagcgcattcctcaccaatgagttttgttgggatggtgagatctcatgtttgggtgagcttcttaaagatgcagatcacccactttggaatactttgaaaaagttaggttgttctcaaaaaacttgcaaagcaatggcaaaacaactagctgatattactctcacgactatcaatgtcacactcgcaccaaattacctgactcaaatatctctccccgatagtgatacatcctacatttcactctctcctgttgcatcgctatcgatgcaaagccactttcatcagaggctccaagatgaaaatcggcatagcgcgataacgcggtttagccgaactaccaacatgggggtcactgcgatgacatgtggcggcgcatttagaatgttaaagtctggcgctaagttttccagcccccctcatcaccgattaaacagtaaacgaagttggttgacgtcagagcatgttcagtcattaaaacagtaccagcgcctcaacaaaagcctcatacctgaaaactctcggattgcactccgtagaaaatacaaaatcgagcttcaaaatatggtcagatcttggtttgcaatgcaagaccatacccttgattcgaacatacttatccaacatttgaatcatgacctatcttacttaggagccacaaaacgttttgcatacgatccagcgatgaccaagctctttactgagcttttgaaacgagagttatcaaattcaatcaataatggtgagcaacacactaatggatcgtttttagtcctaccgaatatcagggtttgtggcgcaacagctttaagctccccggtaacggtggggattccatcacttacagctttctttggcttcgttcacgcatttgaacggaatataaatcgcaccacctcatcgtttcgtgttgaatcctttgcgatatgcgtccatcaactacatgtcgagaagcgaggtttgacagcagagtttgtggaaaaaggcgacgggactatatccgctcccgcgacccgggatgactggcagtgtgatgtcgtatttagccttattttgaacaccaactttgctcaacatattgaccaagatacgttagttacatcactaccaaagcgattggctcggggttcagcaaaaattgcgattgatgactttaaacatatcaactcattctcgacattagaaacagcgatcgaatctctgccaatagaagctggtaggtggttatcactttacgcacagtcaaacaataatctaagtgatctattagcagccatgacagaggaccatcagctcatggcaagctgcgtcggttaccacttgttagaagagcccaaagataaaccaaactccctcagaggttacaaacacgctatcgccgagtgcatcattggactcattaactcaatcacctttagctcagagactgatcccaacacaatcttttggtcgctaaagaactatcaaaactacctagtggtacagccaaggagtatcaacgatgaaactaccgacaaatctagcctatgagcgctctatcgacccatcagatgtctgtttttttgtcgtctggcccgatgatagaaaaacacctttaacctacaattctcgtactctgctcgggcaaatggaagcggcatcattagcctatgatgtctcaggtcaaccaataaaaagtgccaccgctgaggcgttagctcaagggaaccctcatcaagttgatttctgccacgttccatacggtgcgagtcatattgaatgcagtttctccgtctcgttttcttctgaactacgtcaaccatataagtgtaactcaagcaaagttaaacaaacgctagtgcaattagtcgagctctacgaaacgaaaatcggctggactgagctagcaacccgatatttgatgaacatttgcaacggtaaatggctgtggaaaaatacccgtaaagcctattgctggaacattgtacttacaccttggccttggaacggggaaaaggttggatttgaagatattcgtactaactacacctcacggcaagactttaaaaataataaaaattggtctgctatagttgaaatgatcaaaaccgcattttctagtactgatgggctggcgatatttgaagtcagggccaccttgcacttgccaacgaatgctatggtgcggccaagccaagttttcacagaaaaagaaagtggcagtaaaagtaaatctaaaactcaaaacagtcgagtttttcagagtacaactattgatggtgaacgatcgccaatactaggggcctttaaaacgggagcagctattgcaaccattgacgactggtatcctgaagccactgagccactaagggtcggacggtttggggttcatcgcgaagatgtcacttgctaccgtcatccgtctaccggaaaagattttttctcgatattacaacaagcagagcactatattgaagtgttgagcgccaacaaaactcccgctcaagaaactatcaacgacatgcactttttaatggctaacctgattaagggtgggatgttccagcataaaggagactgactgtgaaatggtattataagacaatcacctttctgccagagttgtgcaacaacgagtcactggctgcaaagtgtctccgcgttctgcatggatttaactatcagtatgagacacgaaatatcggcgtttcatttccgctttggtgtgatgcaacggttggaaaaaagatttcatttgtcagcaagaacaagatagaactcgacttactacttaaacaacactatttcgtccaaatggaacaacttcaatactttcatatatccaacactgttctcgtcccagaagattgtacatacgtttcctttagacgctgtcaatctatagataagctcacagcagcagggctggcaaggaaaatcagacgcctggagaaacgtgctctatctagaggcgagcaatttgacccatcatcttttgctcaaaaagagcatactgcaatagcgcactaccactcacttggggagtccagcaaacagacgaaccgcaactttcgactcaatatcaggatgctctcggagcaaccccgtgaggggaactcgatttttagtagctatggcttatcaaattcagaaaactcgtttcagcctgtacccttaatctgacgatataccatgggtgaactgccgagtaggtagctgataacagtacagcgcggctgaaatcatcattaaagcggtgaactgccgagtaggtagctgataacggatccgaattcgctgctgccaccgctgagcaataactagcataaccccttggggcctctaaacgggtcttgaggggttttttgctgaaacctcaggcatttgagaagcacacggtcacactgcttccggtagtcaataaaccggtaaaccagcaatagacataagcggctatttaacgaccctgccctgaaccgacgaccgggtcatcgtggccggatcttgcggcccctcggcttgaacgaattgttagacattatttgccgactaccttggtgatctcgcctttcacgtagtggacaaattcttccaactgatctgcgcgcgaggccaagcgatcttcttcttgtccaagataagcctgtctagcttcaagtatgacgggctgatactgggccggcaggcgctccattgcccagtcggcagcgacatccttcggcgcgattttgccggttactgcgctgtaccaaatgcgggacaacgtaagcactacatttcgctcatcgccagcccagtcgggcggcgagttccatagcgttaaggtttcatttagcgcctcaaatagatcctgttcaggaaccggatcaaagagttcctccgccgctggacctaccaaggcaacgctatgttctcttgcttttgtcagcaagatagccagatcaatgtcgatcgtggctggctcgaagatacctgcaagaatgtcattgcgctgccattctccaaattgcagttcgcgcttagctggataacgccacggaatgatgtcgtcgtgcacaacaatggtgacttctacagcgcggagaatctcgctctctccaggggaagccgaagtttccaaaaggtcgttgatcaaagctcgccgcgttgtttcatcaagccttacggtcaccgtaaccagcaaatcaatatcactgtgtggcttcaggccgccatccactgcggagccgtacaaatgtacggccagcaacgtcggttcgagatggcgctcgatgacgccaactacctctgatagttgagtcgatacttcggcgatcaccgcttccctcatactcttcctttttcaatattattgaagcatttatcagggttattgtctcatgagcggatacatatttgaatgtatttagaaaaataaacaaatagctagctcactcggtcgctacgctccgggcgtgagactgcggcgggcgctgcggacacatacaaagttacccacagattccgtggataagcaggggactaacatgtgaggcaaaacagcagggccgcgccggtggcgtttttccataggctccgccctcctgccagagttcacataaacagacgcttttccggtgcatctgtgggagccgtgaggctcaaccatgaatctgacagtacgggcgaaacccgacaggacttaaagatccccaccgtttccggcgggtcgctccctcttgcgctctcctgttccgaccctgccgtttaccggatacctgttccgcctttctcccttacgggaagtgtggcgctttctcatagctcacacactggtatctcggctcggtgtaggtcgttcgctccaagctgggctgtaagcaagaactccccgttcagcccgactgctgcgccttatccggtaactgttcacttgagtccaacccggaaaagcacggtaaaacgccactggcagcagccattggtaactgggagttcgcagaggatttgtttagctaaacacgcggttgctcttgaagtgtgcgccaaagtccggctacactggaaggacagatttggttgctgtgctctgcgaaagccagttaccacggttaagcagttccccaactgacttaaccttcgatcaaaccacctccccaggtggttttttcgtttacagggcaaaagattacgcgcagaaaaaaaggatctcaagaagatcctttgatcttttctactgaaccgctctagatttcagtgcaatttatctcttcaaatgtagcacctgaagtcagccccatacgatataagttgtaattctcatgttagtcatgccccgcgcccaccggaaggagctgactgggttgaaggctctcaagggcatcggtcgagatcccggtgcctaatgagtgagctaacttacattaattgcgttgcgctcactgcccgctttccagtcgggaaacctgtcgtgccagctgcattaatgaatcggccaacgcgcggggagaggcggtttgcgtattgggcgccagggtggtttttcttttcaccagtgagacgggcaacagctgattgcccttcaccgcctggccctgagagagttgcagcaagcggtccacgctggtttgccccagcaggcgaaaatcctgtttgatggtggttaacggcgggatataacatgagctgtcttcggtatcgtcgtatcccactaccgagatgtccgcaccaacgcgcagcccggactcggtaatggcgcgcattgcgcccagcgccatctgatcgttggcaaccagcatcgcagtgggaacgatgccctcattcagcatttgcatggtttgttgaaaaccggacatggcactccagtcgccttcccgttccgctatcggctgaatttgattgcgagtgagatatttatgccagccagccagacgcagacgcgccgagacagaacttaatgggcccgctaacagcgcgatttgctggtgacccaatgcgaccagatgctccacgcccagtcgcgtaccgtcttcatgggagaaaataatactgttgatgggtgtctggtcagagacatcaagaaataacgccggaacattagtgca

SEQ ID NO: 15 - DNA, 11866 bp, artificial sequence
  Synthetic
cgggatctcgacgctctcccttatgcgactcctgcattaggaaattaatacgactcactataggggaattgtgagcggataacaattcccctgtagaaataattttgtttaactttaataaggagatataccatgggcagcagccatcaccatcatcaccacagccaggatccgaattcgagctcggtataaggagatataccatggcgacaagtttacctacgccctcagcaattacgacttcggcgttagagtatgcattccatactcccgctcgcaatctaacgaaatctcgcggaaaaaacattcatcgttatgtcagtgtaaagatgagtaagaggattacggtagaatctactctagagtgtgatgcctgctatcactttgattttgagccaagtattgttcgcttttgcgctcaaccgattcgatttttatattatctcaatggtcagtctcactcctatgttcctgactttctagttcaatttgataccaacgagtttgttctatatgaagtaaagtcagcttatgctaagaacaaacctgattttgatgttgaatgggaggcgaaagtaaaagcagcaactgaactagggctagaattggagcttgttgaagagagtgatattagggatacggttgtattaaataatcttaagcgcatgcatcgttatgcttcgaaagatgagctgaataacgtacataactctctcttaaaaataataaagtacaatggcgcccaatctgcaagatgcttgggagaacagttgggtttaaaaggccgaactgttttaccaattttgtgcgatttgctgtcaaggtgtttactcgatacacgtttggataagcctctatctcttgaatctcgatttgagttggccagttatggctaagaaagggttctcaagtttccatagaaaagcagtctcttcccaagatacgcttgaatcgatagagcttgtctctagcgctaattgtctagaaagtgttacgtatcaagatatatcagcatttcccgaaacaattgcggtagagattaatttccgattaagcattcttcgctttttagcgcgaaagtgcgaaaccattgtggccaaatcaattgaaccacatcgtgtagagctacagcaaaactatagtagaaaaatacccagtgcaataacgatatatcgatggtggcttgcttttcgaaaatcagactacaaccccattagcttagcacctaatatcaaggatagaggtaatagagagacaaaagtgtcaacagttgttgattctattatggaacaggcagttgaaagagttatatctggacgaaaagtcaatgttagctctgcatataaacgtgttcgacgaaaagttcgtcaatacaatctaactcatggaacgaaatacacgtatcctaagtacgaatctgtaagaaagcgagtaaaaaagaaaaccccatttgagttattagccgcagggaaaggggagagagtagctaagagagagtttcgccgaatgggaaaaaagatcctcacgtctagcgtgctagagagggttgaaatagatcacactgtcgttgacctttttgcagtacacgaagagtatcgaatcccattgggccgaccttggcttactcaattggttgattgttacagtaaagctgtaatcggtttttatttaggtttcgagcctcctagctatgtgtcggtttcccttgcacttaagaatgcaatacaacgcaaagatgacttaatctcctcgtatgaatcgatcgagaatgaatggctatgttatggcatcccagacctactcgtaactgataatggtaaagagtttttgtcgaaagcatttgatcaagcatgtgaatcactattgatcaatgtgcatcaaaataaagttgagacgcccgacaacaaacctcatgttgaacgtaactacgggactattaatacttctctgttagacgatttacctgggaaatccttcagccagtaccttcaaagagaagggtacgactctgtgggagaagctacccttacactcaatgagattagagaaatttacttaatttggttggtggatatttatcataaaaaacccaatcagagaggcactaattgtcctaatgttgcgtggaaaaagggttgtcaagaatgggaaccagaggagttctctggttctaaagacgaattagactttaaatttgctattgttgattacaaacaacttactaaagtagggataactgtctacaaagaactgagttatagcaatgaccgtttagctgaatatagagggaagaaaggaaaccataaagttcagttcaagtataaccctgagtgtatggcagttatttgggtgttggatgaggatatgaatgagtactttacagttaatgcgattgactacgaatatgcaagtagagtatcactttggcaacataaatataacatgaaatatcaagcagaactaaattcagcagaatatgatgaggacaaggaaattgatgcagaaataaaaattgaagaaatcgcagatcgttcaattgttaagactaacaaaatcagagctcggaggcgtggcgctaggcatcaagagaatagcgcaagggctaagtcaatcagtaatgcgaacccggcctcgatacaaaaacatgaagatgaaatcgttagtgcagataatgacgattgggatattgattatgtctgagaaatcgtcaaatgagtgaaacgcgtgaggctcgtatatcaagagctaaaagggcatttgtatccacaccgagcgttaggaaaatcttgagttacatggatagatgtagagatctatcagacctagagtctgagcctacatgcatgatggtctatggtgcttcgggtgtaggtaaaacgaccgtcatcaagaaatacttaaatcaaaacagaagagagtccgaagccgggggcgatataataccggttttgcatattgagttgccagacaatgcgaagccagtagatgcagcaagggaattgctggttgaaatgggtgacccgctagcactttatgaaactgacttagctagattgacgaaaagactgactgaattaatccctgcggtcggcgtgaagctgattattatcgatgagttccaacatttggtggaagaaaggtcaaatcgggttcttacccaagtaggtaattggctaaaaatgatacttaacaaaacgaaatgtccaattgttatatttggtatgccatactcaaaagttgtactgcaagcaaactcgcaacttcacgggcgattttccattcaggttgaactgcgcccctttagctaccagggaggtagaggtgtatttaaaacttttttggaataccttgataaagccctaccttttgaaaaacaggctggcttagccaacgaaagtttgcagaaaaaattgtatgcattctctcagggaaacatgcgttcgttgagaaaccttatttatcaagcatctatcgaagcaattgataatcagcatgagacgataaccgaagaagatttcgtttttgcatcgaagttgacatcgggcgataaacccaactcatggaaaaatccttttgaggagggtgttgaggtaacagaagatatgttacgaccgccaccaaaagatattggttgggaggactatttgagacattcaaccccgagagtgagtaaaccaggtagaaataaaaactttttcgaataacctaggctgctggaaggagatatacatatgtttttgcaaagacctaaaccttacagcgatgaaagtttagaaagtttctttatccgagtggctaacaaaaatggctacggtgatgtccatcgcttcctagaagccactaaacgattccttcaagacattgaccataatggctatcaaacctttccgactgatataactcggataaacccatactcagctaaaaacagttccagcgcacgaactgcgtcattcctgaaacttgcacaattgacatttaatgaaccgccagagctacttgggttggcaattaacagaacaaacatgaaatactcgccgtcaactagcgcggttgttagaggtgcagaagtctttcctcgcagtttactacggacgcactccatcccctgctgtcctttgtgtctgcgagaaaatggctacgcctcctacctttggcactttcaggggtacgaatactgccacagccataacgtacctttaattaccacttgtagctgtggtaaggagtttgactaccgagtatctgggttaaagggcatttgctgcaaatgcaaggagcctatcaccttaaccagcagggagaacggtcatgaggcagcgtgtactgtttcaaactggcttgctggccatgaatctaaacctctgccaaatcttcctaaaagctaccgatggggtttagttcattggtggatgggtattaaagatagcgagttcgatcacttttcgttcgttcaatttttctcaaactggccaaggtcattccactcgataatcgaagatgaagtagagttcaaccttgagcatgctgttgtcagcacgtctgaattacgactaaaagatcttcttggtcgattgtttttcggttcaattcggttacctgagcggaatcttcaacacaatatcatccttggtgagcttctctgctatttagaaaatcgtttatggcaagacaagggattaatcgccaacctcaaaatgaacgcgttagaggcgactgtaatgttaaattgtagcctcgatcagattgcatcaatggttgaacaacgcatcttgaagccaaatcgaaaaagcaagcccaacagccctcttgatgttaccgattatctatttcatttcggcgatattttctgtctttggttagctgagttccaaagcgatgagtttaaccgttcgttttatgtgtcgaggtggtaaatgcaaactctgaaagaactaatcgcatccaatcctgacgacttaacaactgaacttaagagagcatttcgtccactcacaccgcatattgcaattgatggtaatgaacttgacgcactgacgatattagtcaatttaaccgataagactgatgatcagaaagacctgctcgatcgagccaaatgcaagcaaaaacttcgagatgaaaaatggtgggctagctgcataaattgcgttaattacagacaaagccataacccaaaattcccggatatacgttctgaaggcgtgattcgaacccaagccctgggtgaattaccgagtttcctactctcgtcctcaaaaatcccaccataccattggtcatatagccatgattcaaaatacgtcaacaaaagcgcattcctcaccaatgagttttgttgggatggtgagatctcatgtttgggtgagcttcttaaagatgcagatcacccactttggaatactttgaaaaagttaggttgttctcaaaaaacttgcaaagcaatggcaaaacaactagctgatattactctcacgactatcaatgtcacactcgcaccaaattacctgactcaaatatctctccccgatagtgatacatcctacatttcactctctcctgttgcatcgctatcgatgcaaagccactttcatcagaggctccaagatgaaaatcggcatagcgcgataacgcggtttagccgaactaccaacatgggggtcactgcgatgacatgtggcggcgcatttagaatgttaaagtctggcgctaagttttccagcccccctcatcaccgattaaacagtaaacgaagttggttgacgtcagagcatgttcagtcattaaaacagtaccagcgcctcaacaaaagcctcatacctgaaaactctcggattgcactccgtagaaaatacaaaatcgagcttcaaaatatggtcagatcttggtttgcaatgcaagaccatacccttgattcgaacatacttatccaacatttgaatcatgacctatcttacttaggagccacaaaacgttttgcatacgatccagcgatgaccaagctctttactgagcttttgaaacgagagttatcaaattcaatcaataatggtgagcaacacactaatggatcgtttttagtcctaccgaatatcagggtttgtggcgcaacagctttaagctccccggtaacggtggggattccatcacttacagctttctttggcttcgttcacgcatttgaacggaatataaatcgcaccacctcatcgtttcgtgttgaatcctttgcgatatgcgtccatcaactacatgtcgagaagcgaggtttgacagcagagtttgtggaaaaaggcgacgggactatatccgctcccgcgacccgggatgactggcagtgtgatgtcgtatttagccttattttgaacaccaactttgctcaacatattgaccaagatacgttagttacatcactaccaaagcgattggctcggggttcagcaaaaattgcgattgatgactttaaacatatcaactcattctcgacattagaaacagcgatcgaatctctgccaatagaagctggtaggtggttatcactttacgcacagtcaaacaataatctaagtgatctattagcagccatgacagaggaccatcagctcatggcaagctgcgtcggttaccacttgttagaagagcccaaagataaaccaaactccctcagaggttacaaacacgctatcgccgagtgcatcattggactcattaactcaatcacctttagctcagagactgatcccaacacaatcttttggtcgctaaagaactatcaaaactacctagtggtacagccaaggagtatcaacgatgaaactaccgacaaatctagcctatgagcgctctatcgacccatcagatgtctgtttttttgtcgtctggcccgatgatagaaaaacacctttaacctacaattctcgtactctgctcgggcaaatggaagcggcatcattagcctatgatgtctcaggtcaaccaataaaaagtgccaccgctgaggcgttagctcaagggaaccctcatcaagttgatttctgccacgttccatacggtgcgagtcatattgaatgcagtttctccgtctcgttttcttctgaactacgtcaaccatataagtgtaactcaagcaaagttaaacaaacgctagtgcaattagtcgagctctacgaaacgaaaatcggctggactgagctagcaacccgatatttgatgaacatttgcaacggtaaatggctgtggaaaaatacccgtaaagcctattgctggaacattgtacttacaccttggccttggaacggggaaaaggttggatttgaagatattcgtactaactacacctcacggcaagactttaaaaataataaaaattggtctgctatagttgaaatgatcaaaaccgcattttctagtactgatgggctggcgatatttgaagtcagggccaccttgcacttgccaacgaatgctatggtgcggccaagccaagttttcacagaaaaagaaagtggcagtaaaagtaaatctaaaactcaaaacagtcgagtttttcagagtacaactattgatggtgaacgatcgccaatactaggggcctttaaaacgggagcagctattgcaaccattgacgactggtatcctgaagccactgagccactaagggtcggacggtttggggttcatcgcgaagatgtcacttgctaccgtcatccgtctaccggaaaagattttttctcgatattacaacaagcagagcactatattgaagtgttgagcgccaacaaaactcccgctcaagaaactatcaacgacatgcactttttaatggctaacctgattaagggtgggatgttccagcataaaggagactgactgtgaaatggtattataagacaatcacctttctgccagagttgtgcaacaacgagtcactggctgcaaagtgtctccgcgttctgcatggatttaactatcagtatgagacacgaaatatcggcgtttcatttccgctttggtgtgatgcaacggttggaaaaaagatttcatttgtcagcaagaacaagatagaactcgacttactacttaaacaacactatttcgtccaaatggaacaacttcaatactttcatatatccaacactgttctcgtcccagaagattgtacatacgtttcctttagacgctgtcaatctatagataagctcacagcagcagggctggcaaggaaaatcagacgcctggagaaacgtgctctatctagaggcgagcaatttgacccatcatcttttgctcaaaaagagcatactgcaatagcgcactaccactcacttggggagtccagcaaacagacgaaccgcaactttcgactcaatatcaggatgctctcggagcaaccccgtgaggggaactcgatttttagtagctatggcttatcaaattcagaaaactcgtttcagcctgtacccttaatctgacgatataccatgggtgaactgccgagtaggtagctgataactgggaggattcataaagcattgtttgttggctgtgaactgccgagtaggtagctgataacggatccgaattcgctgctgccaccgctgagcaataactagcataaccccttggggcctctaaacgggtcttgaggggttttttgctgaaacctcaggcatttgagaagcacacggtcacactgcttccggtagtcaataaaccggtaaaccagcaatagacataagcggctatttaacgaccctgccctgaaccgacgaccgggtcatcgtggccggatcttgcggcccctcggcttgaacgaattgttagacattatttgccgactaccttggtgatctcgcctttcacgtagtggacaaattcttccaactgatctgcgcgcgaggccaagcgatcttcttcttgtccaagataagcctgtctagcttcaagtatgacgggctgatactgggccggcaggcgctccattgcccagtcggcagcgacatccttcggcgcgattttgccggttactgcgctgtaccaaatgcgggacaacgtaagcactacatttcgctcatcgccagcccagtcgggcggcgagttccatagcgttaaggtttcatttagcgcctcaaatagatcctgttcaggaaccggatcaaagagttcctccgccgctggacctaccaaggcaacgctatgttctcttgcttttgtcagcaagatagccagatcaatgtcgatcgtggctggctcgaagatacctgcaagaatgtcattgcgctgccattctccaaattgcagttcgcgcttagctggataacgccacggaatgatgtcgtcgtgcacaacaatggtgacttctacagcgcggagaatctcgctctctccaggggaagccgaagtttccaaaaggtcgttgatcaaagctcgccgcgttgtttcatcaagccttacggtcaccgtaaccagcaaatcaatatcactgtgtggcttcaggccgccatccactgcggagccgtacaaatgtacggccagcaacgtcggttcgagatggcgctcgatgacgccaactacctctgatagttgagtcgatacttcggcgatcaccgcttccctcatactcttcctttttcaatattattgaagcatttatcagggttattgtctcatgagcggatacatatttgaatgtatttagaaaaataaacaaatagctagctcactcggtcgctacgctccgggcgtgagactgcggcgggcgctgcggacacatacaaagttacccacagattccgtggataagcaggggactaacatgtgaggcaaaacagcagggccgcgccggtggcgtttttccataggctccgccctcctgccagagttcacataaacagacgcttttccggtgcatctgtgggagccgtgaggctcaaccatgaatctgacagtacgggcgaaacccgacaggacttaaagatccccaccgtttccggcgggtcgctccctcttgcgctctcctgttccgaccctgccgtttaccggatacctgttccgcctttctcccttacgggaagtgtggcgctttctcatagctcacacactggtatctcggctcggtgtaggtcgttcgctccaagctgggctgtaagcaagaactccccgttcagcccgactgctgcgccttatccggtaactgttcacttgagtccaacccggaaaagcacggtaaaacgccactggcagcagccattggtaactgggagttcgcagaggatttgtttagctaaacacgcggttgctcttgaagtgtgcgccaaagtccggctacactggaaggacagatttggttgctgtgctctgcgaaagccagttaccacggttaagcagttccccaactgacttaaccttcgatcaaaccacctccccaggtggttttttcgtttacagggcaaaagattacgcgcagaaaaaaaggatctcaagaagatcctttgatcttttctactgaaccgctctagatttcagtgcaatttatctcttcaaatgtagcacctgaagtcagccccatacgatataagttgtaattctcatgttagtcatgccccgcgcccaccggaaggagctgactgggttgaaggctctcaagggcatcggtcgagatcccggtgcctaatgagtgagctaacttacattaattgcgttgcgctcactgcccgctttccagtcgggaaacctgtcgtgccagctgcattaatgaatcggccaacgcgcggggagaggcggtttgcgtattgggcgccagggtggtttttcttttcaccagtgagacgggcaacagctgattgcccttcaccgcctggccctgagagagttgcagcaagcggtccacgctggtttgccccagcaggcgaaaatcctgtttgatggtggttaacggcgggatataacatgagctgtcttcggtatcgtcgtatcccactaccgagatgtccgcaccaacgcgcagcccggactcggtaatggcgcgcattgcgcccagcgccatctgatcgttggcaaccagcatcgcagtgggaacgatgccctcattcagcatttgcatggtttgttgaaaaccggacatggcactccagtcgccttcccgttccgctatcggctgaatttgattgcgagtgagatatttatgccagccagccagacgcagacgcgccgagacagaacttaatgggcccgctaacagcgcgatttgctggtgacccaatgcgaccagatgctccacgcccagtcgcgtaccgtcttcatgggagaaaataatactgttgatgggtgtctggtcagagacatcaagaaataacgccggaacattagtgcaggcagcttccacagcaatggcatcctggtcatccagcggatagttaatgatcagcccactgacgcgttgcgcgagaagattgtgcaccgccgctttacaggcttcgacgccgcttcgttctaccatcgacaccaccacgctggcacccagttgatcggcgcgagatttaatcgccgcgacaatttgcgacggcgcgtgcagggccagactggaggtggcaacgccaatcagcaacgactgtttgcccgccagttgttgtgccacgcggttgggaatgtaattcagctccgccatcgccgcttccactttttcccgcgttttcgcagaaacgtggctggcctggttcaccacgcgggaaacggtctgataagagacaccggcatactctgcgacatcgtataacgttactggtttcacattcaccaccctgaattgactctcttccgggcgctatcatgccataccgcgaaaggttttgcgccattcgatggtgtc

SEQ ID NO: 16 - DNA, 3453 bp, artificial sequence
  Synthetic
gacgaaagggcctcgtgatacgcctatttttataggttaatgtcatgataataatggtttcttagacgtcaggtggcacttttcggggaaatgtgcgcggaacccctatttgtttatttttctaaatacattcaaatatgtatccgctcatgagacaataaccctgataaatgcttcaataatattgaaaaaggaagagtatgagtattcaacatttccgtgtcgcccttattcccttttttgcggcattttgccttcctgtttttgctcacccagaaacgctggtgaaagtaaaagatgctgaagatcagttgggtgcacgagtgggttacatcgaactggatctcaacagcggtaagatccttgagagttttcgccccgaagaacgttttccaatgatgagcacttttaaagttctgctatgtggcgcggtattatcccgtattgacgccgggcaagagcaactcggtcgccgcatacactattctcagaatgacttggttgagtactcaccagtcacagaaaagcatcttacggatggcatgacagtaagagaattatgcagtgctgccataaccatgagtgataacactgcggccaacttacttctgacaacgatcggaggaccgaaggagctaaccgcttttttgcacaacatgggggatcatgtaactcgccttgatcgttgggaaccggagctgaatgaagccataccaaacgacgagcgtgacaccacgatgcctgtagcaatggcaacaacgttgcgcaaactattaactggcgaactacttactctagcttcccggcaacaattaatagactggatggaggcggataaagttgcaggaccacttctgcgctcggcccttccggctggctggtttattgctgataaatctggagccggtgagcgtggctctcgcggtatcattgcagcactggggccagatggtaagccctcccgtatcgtagttatctacacgacggggagtcaggcaactatggatgaacgaaatagacagatcgctgagataggtgcctcactgattaagcattggtaactgtcagaccaagtttactcatatatactttagattgatttaaaacttcatttttaatttaaaaggatctaggtgaagatcctttttgataatctcatgaccaaaatcccttaacgtgagttttcgttccactgagcgtcagaccccgtagaaaagatcaaaggatcttcttgagatcctttttttctgcgcgtaatctgctgcttgcaaacaaaaaaaccaccgctaccagcggtggtttgtttgccggatcaagagctaccaactctttttccgaaggtaactggcttcagcagagcgcagataccaaatactgttcttctagtgtagccgtagttaggccaccacttcaagaactctgtagcaccgcctacatacctcgctctgctaatcctgttaccagtggctgctgccagtggcgataagtcgtgtcttaccgggttggactcaagacgatagttaccggataaggcgcagcggtcgggctgaacggggggttcgtgcacacagcccagcttggagcgaacgacctacaccgaactgagatacctacagcgtgagctatgagaaagcgccacgcttcccgaagggagaaaggcggacaggtatccggtaagcggcagggtcggaacaggagagcgcacgagggagcttccagggggaaacgcctggtatctttatagtcctgtcgggtttcgccacctctgacttgagcgtcgatttttgtgatgctcgtcaggggggcggagcctatggaaaaacgccagcaacgcggcctttttacggttcctggccttttgctggccttttgctcacatgttctttcctgcgttatcccctgattctgtggataaccgtattaccgcctttgagtgagctgataccgctcgccgcagccgaactaccgagcgcagcgagtcagtgagcgaggaagcggaagagcgcccaatacgcaaaccgcctctccccgcgcgttggccgattcattaatgcagcccaagctttgttgatacaaccataaaatgataattacacccataaattgataattatcacacccataaattgatattgcctcttcatggtctaaacttcagtaagtttacgacattttcctcgaggtcatttccggggatccatggagaaaaaaatcactggatataccaccgttgatatatcccaatggcatcgtaaagaacattttgaggcatttcagtcagttgctcaatgtacctataaccagaccgttcagctggatattacggcctttttaaagaccgtaaagaaaaataagcacaagttttatccggcctttattcacattcttgcccgcctgatgaatgctcatccggagttccgtatggcaatgaaagacggtgagctggtgatatgggatagtgttcacccttgttacaccgttttccatgagcaaactgaaacgttttcatcgctctggagtgaataccacgacgatttccggcagtttctacacatatattcgcaagatgtggcgtgttacggtgaaaacctggcctatttccctaaagggtttattgagaatatgtttttcgtctcagccaatccctgggtgagtttcaccagttttgatttaaacgtggccaatatggacaacttcttcgcccccgttttcactatgggcaaatattatacgcaaggcgacaaggtgctgatgccgctggcgattcaggttcatcatgccgtttgtgatggcttccatgtcggcagaatgcttaatgaattacaacagtactgcgatgagtggcagggcggggcgtaatttttttaaggcagttattggtgcccttctagagtccttactgcagtagttttgctgaaatactcgattcacaaaaatatcaacttatggttgttttgtgagatatcaatatatggttgttttgtggttaagttgctgattataaataattattaaatatcactttatggttgcatcaacaggtaccgagctcgaattcactggccgtcgttttacaacgtcgtgactgggaaaaccctggcgttacccaacttaatcgccttgcagcacatccccctttcgccagctggcgtaatagcgaagaggcccgcaccgatcgcccttcccaacagttgcgcagcctgaatggcgaatggcgcctgatgcggtattttctccttacgcatctgtgcggtatttcacaccgcatatggtgcactctcagtacaatctgctctgatgccgcatagttaagccagccccgacacccgccaacacccgctgacgcgccctgacgggcttgtctgctcccggcatccgcttacagacaagctgtgaccgtctccgggagctgcatgtgtcagaggttttcaccgtcatcaccgaaacgcgcga

SEQ ID NO: 17 - DNA, 11979 bp, artificial sequence
  Synthetic
tttcggggaaatgtgcgcggaacccctatttgtttatttttctaaatacattcaaatatgtatccgctcatgagacaataaccctgataaatgcttcaataatattgaaaaaggaagagtatgagtattcaacatttccgtgtcgcccttattcccttttttgcggcattttgccttcctgtttttgctcacccagaaacgctggtgaaagtaaaagatgctgaagatcagttgggtgcacgagtgggttacatcgaactggatctcaacagcggtaagatccttgagagttttcgccccgaagaacgttttccaatgatgagcacttttaaagttctgctatgtggcgcggtattatcccgtattgacgccgggcaagagcaactcggtcgccgcatacactattctcagaatgacttggttgagtactcaccagtcacagaaaagcatcttacggatggcatgacagtaagagaattatgcagtgctgccataaccatgagtgataacactgcggccaacttacttctgacaacgatcggaggaccgaaggagctaaccgcttttttgcacaacatgggggatcatgtaactcgccttgatcgttgggaaccggagctgaatgaagccataccaaacgacgagcgtgacaccacgatgcctgtagcaatggcaacaacgttgcgcaaactattaactggcgaactacttactctagcttcccggcaacaattaatagactggatggaggcggataaagttgcaggaccacttctgcgctcggcccttccggctggctggtttattgctgataaatctggagccggtgagcgtggctctcgcggtatcattgcagcactggggccagatggtaagccctcccgtatcgtagttatctacacgacggggagtcaggcaactatggatgaacgaaatagacagatcgctgagataggtgcctcactgattaagcattggtaactgtcagaccaagtttactcatatatactttagattgatttaaaacttcatttttaatttaaaaggatctaggtgaagatcctttttgataatctcatgaccaaaatcccttaacgtgagttttcgttccactgagcgtcagaccccgtagaaaagatcaaaggatcttcttgagatcctttttttctgcgcgtaatctgctgcttgcaaacaaaaaaaccaccgctaccagcggtggtttgtttgccggatcaagagctaccaactctttttccgaaggtaactggcttcagcagagcgcagataccaaatactgttcttctagtgtagccgtagttaggccaccacttcaagaactctgtagcaccgcctacatacctcgctctgctaatcctgttaccagtggctgctgccagtggcgataagtcgtgtcttaccgggttggactcaagacgatagttaccggataaggcgcagcggtcgggctgaacggggggttcgtgcacacagcccagcttggagcgaacgacctacaccgaactgagatacctacagcgtgagctatgagaaagcgccacgcttcccgaagggagaaaggcggacaggtatccggtaagcggcagggtcggaacaggagagcgcacgagggagcttccagggggaaacgcctggtatctttatagtcctgtcgggtttcgccacctctgacttgagcgtcgatttttgtgatgctcgtcaggggggcggagcctatggaaaaacgccagcaacgcggcctttttacggttcctggccttttgctggccttttgctcacatgttctttcctgcgttatcccctgattctgtggataaccgtattaccgcctttgagtgagctgataccgctcgccgcagccgaacgaccgagcgcagcgagtcagtgagcgaggagcgactcctgcattaggaaattaatacgactcactataggggaattgtgagcggataacaattcccctgtagaaataattttgtttaactttaataaggagatataccatgggtgaactgccgagtaggtagctgataacagtacagcgcggctgaaatcatcattaaagcggtgaactgccgagtaggtagctgataacggatccgaattcgagcgaaggagatatacatatgtttttgcaaagacctaaaccttacagcgatgaaagtttagaaagtttctttatccgagtggctaacaaaaatggctacggtgatgtccatcgcttcctagaagccactaaacgattccttcaagacattgaccataatggctatcaaacctttccgactgatataactcggataaacccatactcagctaaaaacagttccagcgcacgaactgcgtcattcctgaaacttgcacaattgacatttaatgaaccgccagagctacttgggttggcaattaacagaacaaacatgaaatactcgccgtcaactagcgcggttgttagaggtgcagaagtctttcctcgcagtttactacggacgcactccatcccctgctgtcctttgtgtctgcgagaaaatggctacgcctcctacctttggcactttcaggggtacgaatactgccacagccataacgtacctttaattaccacttgtagctgtggtaaggagtttgactaccgagtatctgggttaaagggcatttgctgcaaatgcaaggagcctatcaccttaaccagcagggagaacggtcatgaggcagcgtgtactgtttcaaactggcttgctggccatgaatctaaacctctgccaaatcttcctaaaagctaccgatggggtttagttcattggtggatgggtattaaagatagcgagttcgatcacttttcgttcgttcaatttttctcaaactggccaaggtcattccactcgataatcgaagatgaagtagagttcaaccttgagcatgctgttgtcagcacgtctgaattacgactaaaagatcttcttggtcgattgtttttcggttcaattcggttacctgagcggaatcttcaacacaatatcatccttggtgagcttctctgctatttagaaaatcgtttatggcaagacaagggattaatcgccaacctcaaaatgaacgcgttagaggcgactgtaatgttaaattgtagcctcgatcagattgcatcaatggttgaacaacgcatcttgaagccaaatcgaaaaagcaagcccaacagccctcttgatgttaccgattatctatttcatttcggcgatattttctgtctttggttagctgagttccaaagcgatgagtttaaccgttcgttttatgtgtcgaggtggtaaatgcaaactctgaaagaactaatcgcatccaatcctgacgacttaacaactgaacttaagagagcatttcgtccactcacaccgcatattgcaattgatggtaatgaacttgacgcactgacgatattagtcaatttaaccgataagactgatgatcagaaagacctgctcgatcgagccaaatgcaagcaaaaacttcgagatgaaaaatggtgggctagctgcataaattgcgttaattacagacaaagccataacccaaaattcccggatatacgttctgaaggcgtgattcgaacccaagccctgggtgaattaccgagtttcctactctcgtcctcaaaaatcccaccataccattggtcatatagccatgattcaaaatacgtcaacaaaagcgcattcctcaccaatgagttttgttgggatggtgagatctcatgtttgggtgagcttcttaaagatgcagatcacccactttggaatactttgaaaaagttaggttgttctcaaaaaacttgcaaagcaatggcaaaacaactagctgatattactctcacgactatcaatgtcacactcgcaccaaattacctgactcaaatatctctccccgatagtgatacatcctacatttcactctctcctgttgcatcgctatcgatgcaaagccactttcatcagaggctccaagatgaaaatcggcatagcgcgataacgcggtttagccgaactaccaacatgggggtcactgcgatgacatgtggcggcgcatttagaatgttaaagtctggcgctaagttttccagcccccctcatcaccgattaaacagtaaacgaagttggttgacgtcagagcatgttcagtcattaaaacagtaccagcgcctcaacaaaagcctcatacctgaaaactctcggattgcactccgtagaaaatacaaaatcgagcttcaaaatatggtcagatcttggtttgcaatgcaagaccatacccttgattcgaacatacttatccaacatttgaatcatgacctatcttacttaggagccacaaaacgttttgcatacgatccagcgatgaccaagctctttactgagcttttgaaacgagagttatcaaattcaatcaataatggtgagcaacacactaatggatcgtttttagtcctaccgaatatcagggtttgtggcgcaacagctttaagctccccggtaacggtggggattccatcacttacagctttctttggcttcgttcacgcatttgaacggaatataaatcgcaccacctcatcgtttcgtgttgaatcctttgcgatatgcgtccatcaactacatgtcgagaagcgaggtttgacagcagagtttgtggaaaaaggcgacgggactatatccgctcccgcgacccgggatgactggcagtgtgatgtcgtatttagccttattttgaacaccaactttgctcaacatattgaccaagatacgttagttacatcactaccaaagcgattggctcggggttcagcaaaaattgcgattgatgactttaaacatatcaactcattctcgacattagaaacagcgatcgaatctctgccaatagaagctggtaggtggttatcactttacgcacagtcaaacaataatctaagtgatctattagcagccatgacagaggaccatcagctcatggcaagctgcgtcggttaccacttgttagaagagcccaaagataaaccaaactccctcagaggttacaaacacgctatcgccgagtgcatcattggactcattaactcaatcacctttagctcagagactgatcccaacacaatcttttggtcgctaaagaactatcaaaactacctagtggtacagccaaggagtatcaacgatgaaactaccgacaaatctagcctatgagcgctctatcgacccatcagatgtctgtttttttgtcgtctggcccgatgatagaaaaacacctttaacctacaattctcgtactctgctcgggcaaatggaagcggcatcattagcctatgatgtctcaggtcaaccaataaaaagtgccaccgctgaggcgttagctcaagggaaccctcatcaagttgatttctgccacgttccatacggtgcgagtcatattgaatgcagtttctccgtctcgttttcttctgaactacgtcaaccatataagtgtaactcaagcaaagttaaacaaacgctagtgcaattagtcgagctctacgaaacgaaaatcggctggactgagctagcaacccgatatttgatgaacatttgcaacggtaaatggctgtggaaaaatacccgtaaagcctattgctggaacattgtacttacaccttggccttggaacggggaaaaggttggatttgaagatattcgtactaactacacctcacggcaagactttaaaaataataaaaattggtctgctatagttgaaatgatcaaaaccgcattttctagtactgatgggctggcgatatttgaagtcagggccaccttgcacttgccaacgaatgctatggtgcggccaagccaagttttcacagaaaaagaaagtggcagtaaaagtaaatctaaaactcaaaacagtcgagtttttcagagtacaactattgatggtgaacgatcgccaatactaggggcctttaaaacgggagcagctattgcaaccattgacgactggtatcctgaagccactgagccactaagggtcggacggtttggggttcatcgcgaagatgtcacttgctaccgtcatccgtctaccggaaaagattttttctcgatattacaacaagcagagcactatattgaagtgttgagcgccaacaaaactcccgctcaagaaactatcaacgacatgcactttttaatggctaacctgattaagggtgggatgttccagcataaaggagactgactgtgaaatggtattataagacaatcacctttctgccagagttgtgcaacaacgagtcactggctgcaaagtgtctccgcgttctgcatggatttaactatcagtatgagacacgaaatatcggcgtttcatttccgctttggtgtgatgcaacggttggaaaaaagatttcatttgtcagcaagaacaagatagaactcgacttactacttaaacaacactatttcgtccaaatggaacaacttcaatactttcatatatccaacactgttctcgtcccagaagattgtacatacgtttcctttagacgctgtcaatctatagataagctcacagcagcagggctggcaaggaaaatcagacgcctggagaaacgtgctctatctagaggcgagcaatttgacccatcatcttttgctcaaaaagagcatactgcaatagcgcactaccactcacttggggagtccagcaaacagacgaaccgcaactttcgactcaatatcaggatgctctcggagcaaccccgtgaggggaactcgatttttagtagctatggcttatcaaattcagaaaactcgtttcagcctgtacccttaatctgacctttaataaggagatataccatggcgacaagtttacctacgccctcagcaattacgacttcggcgttagagtatgcattccatactcccgctcgcaatctaacgaaatctcgcggaaaaaacattcatcgttatgtcagtgtaaagatgagtaagaggattacggtagaatctactctagagtgtgatgcctgctatcactttgattttgagccaagtattgttcgcttttgcgctcaaccgattcgatttttatattatctcaatggtcagtctcactcctatgttcctgactttctagttcaatttgataccaacgagtttgttctatatgaagtaaagtcagcttatgctaagaacaaacctgattttgatgttgaatgggaggcgaaagtaaaagcagcaactgaactagggctagaattggagcttgttgaagagagtgatattagggatacggttgtattaaataatcttaagcgcatgcatcgttatgcttcgaaagatgagctgaataacgtacataactctctcttaaaaataataaagtacaatggcgcccaatctgcaagatgcttgggagaacagttgggtttaaaaggccgaactgttttaccaattttgtgcgatttgctgtcaaggtgtttactcgatacacgtttggataagcctctatctcttgaatctcgatttgagttggccagttatggctaagaaagggttctcaagtttccatagaaaagcagtctcttcccaagatacgcttgaatcgatagagcttgtctctagcgctaattgtctagaaagtgttacgtatcaagatatatcagcatttcccgaaacaattgcggtagagattaatttccgattaagcattcttcgctttttagcgcgaaagtgcgaaaccattgtggccaaatcaattgaaccacatcgtgtagagctacagcaaaactatagtagaaaaatacccagtgcaataacgatatatcgatggtggcttgcttttcgaaaatcagactacaaccccattagcttagcacctaatatcaaggatagaggtaatagagagacaaaagtgtcaacagttgttgattctattatggaacaggcagttgaaagagttatatctggacgaaaagtcaatgttagctctgcatataaacgtgttcgacgaaaagttcgtcaatacaatctaactcatggaacgaaatacacgtatcctaagtacgaatctgtaagaaagcgagtaaaaaagaaaaccccatttgagttattagccgcagggaaaggggagagagtagctaagagagagtttcgccgaatgggaaaaaagatcctcacgtctagcgtgctagagagggttgaaatagatcacactgtcgttgacctttttgcagtacacgaagagtatcgaatcccattgggccgaccttggcttactcaattggttgattgttacagtaaagctgtaatcggtttttatttaggtttcgagcctcctagctatgtgtcggtttcccttgcacttaagaatgcaatacaacgcaaagatgacttaatctcctcgtatgaatcgatcgagaatgaatggctatgttatggcatcccagacctactcgtaactgataatggtaaagagtttttgtcgaaagcatttgatcaagcatgtgaatcactattgatcaatgtgcatcaaaataaagttgagacgcccgacaacaaacctcatgttgaacgtaactacgggactattaatacttctctgttagacgatttacctgggaaatccttcagccagtaccttcaaagagaagggtacgactctgtgggagaagctacccttacactcaatgagattagagaaatttacttaatttggttggtggatatttatcataaaaaacccaatcagagaggcactaattgtcctaatgttgcgtggaaaaagggttgtcaagaatgggaaccagaggagttctctggttctaaagacgaattagactttaaatttgctattgttgattacaaacaacttactaaagtagggataactgtctacaaagaactgagttatagcaatgaccgtttagctgaatatagagggaagaaaggaaaccataaagttcagttcaagtataaccctgagtgtatggcagttatttgggtgttggatgaggatatgaatgagtactttacagttaatgcgattgactacgaatatgcaagtagagtatcactttggcaacataaatataacatgaaatatcaagcagaactaaattcagcagaatatgatgaggacaaggaaattgatgcagaaataaaaattgaagaaatcgcagatcgttcaattgttaagactaacaaaatcagagctcggaggcgtggcgctaggcatcaagagaatagcgcaagggctaagtcaatcagtaatgcgaacccggcctcgatacaaaaacatgaagatgaaatcgttagtgcagataatgacgattgggatattgattatgtctgagaaatcgtcaaatgagtgaaacgcgtgaggctcgtatatcaagagctaaaagggcatttgtatccacaccgagcgttaggaaaatcttgagttacatggatagatgtagagatctatcagacctagagtctgagcctacatgcatgatggtctatggtgcttcgggtgtaggtaaaacgaccgtcatcaagaaatacttaaatcaaaacagaagagagtccgaagccgggggcgatataataccggttttgcatattgagttgccagacaatgcgaagccagtagatgcagcaagggaattgctggttgaaatgggtgacccgctagcactttatgaaactgacttagctagattgacgaaaagactgactgaattaatccctgcggtcggcgtgaagctgattattatcgatgagttccaacatttggtggaagaaaggtcaaatcgggttcttacccaagtaggtaattggctaaaaatgatacttaacaaaacgaaatgtccaattgttatatttggtatgccatactcaaaagttgtactgcaagcaaactcgcaacttcacgggcgattttccattcaggttgaactgcgcccctttagctaccagggaggtagaggtgtatttaaaacttttttggaataccttgataaagccctaccttttgaaaaacaggctggcttagccaacgaaagtttgcagaaaaaattgtatgcattctctcagggaaacatgcgttcgttgagaaaccttatttatcaagcatctatcgaagcaattgataatcagcatgagacgataaccgaagaagatttcgtttttgcatcgaagttgacatcgggcgataaacccaactcatggaaaaatccttttgaggagggtgttgaggtaacagaagatatgttacgaccgccaccaaaagatattggttgggaggactatttgagacattcaaccccgagagtgagtaaaccaggtagaaataaaaactttttcgaataacctaggctgctgcgctgctgccaccgctgagcaataactagcataaccccttggggcctctaaacgggtcttgaggggttttttgctgaaacctcaggcatttgttgttgatacaaccataaaatgataattacacccataaattgataattatcacacccataaattgatattgcctcttcatggtctaaacttcagtaagtttacgacattttcctcgaggtcatttccggggatccatggagaaaaaaatcactggatataccaccgttgatatatcccaatggcatcgtaaagaacattttgaggcatttcagtcagttgctcaatgtacctataaccagaccgttcagctggatattacggcctttttaaagaccgtaaagaaaaataagcacaagttttatccggcctttattcacattcttgcccgcctgatgaatgctcatccggagttccgtatggcaatgaaagacggtgagctggtgatatgggatagtgttcacccttgttacaccgttttccatgagcaaactgaaacgttttcatcgctctggagtgaataccacgacgatttccggcagtttctacacatatattcgcaagatgtggcgtgttacggtgaaaacctggcctatttccctaaagggtttattgagaatatgtttttcgtctcagccaatccctgggtgagtttcaccagttttgatttaaacgtggccaatatggacaacttcttcgcccccgttttcactatgggcaaatattatacgcaaggcgacaaggtgctgatgccgctggcgattcaggttcatcatgccgtttgtgatggcttccatgtcggcagaatgcttaatgaattacaacagtactgcgatgagtggcagggcggggcgtaatttttttaaggcagttattggtgcccttctagagtccttactgcagtagttttgctgaaatactcgattcacaaaaatatcaacttatggttgttttgtgagatatcaatatatggttgttttgtggttaagttgctgattataaataattattaaatatcactttatggttgcatcaacaggtaccgagctcgaattcactggccgtcgttttacaacgtcgtgactgggaaaaccctggcgttacccaacttaatcgccttgcagcacatccccctttcgccagctggcgtaatagcgaagaggcccgcaccgatcgcccttcccaacagttgcgcagcctgaatggcgaatggcgcctgatgcggtattttctccttacgcatctgtgcggtatttcacaccgcatatggtgcactctcagtacaatctgctctgatgccgcatagttaagccagccccgacacccgccaacacccgctgacgcgccctgacgggcttgtctgctcccggcatccgcttacagacaagctgtgaccgtctccgggagctgcatgtgtcagaggttttcaccgtcatcaccgaaacgcgcgagacgaaagggcctcgtgatacgcctatttttataggttaatgtcatgataataatggtttcttagacgtcaggtggcact

SEQ ID NO: 18 - DNA, 12874 bp, artificial sequence
  Synthetic
aacgtggctggcctggttcaccacgcgggaaacggtctgataagagacaccggcatactctgcgacatcgtataacgttactggtttcacattcaccaccctgaattgactctcttccgggcgctatcatgccataccgcgaaaggttttgcgccattcgatggtgtccgggatctcgacgctctcccttatgcgactcctgcattaggaatggataaccgtattaccgcctttgagtgagctgataccgctcgccgcagccgaactaccgagcgcagcgagtcagtgagcgaggagcgactcctgcattaggaaattaatacgactcactataggggaattgtgagcggataacaattcccctgtagaaataattttgtttaactttaataaggagatataccatgggtgaactgccgagtaggtagctgataacagtacagcgcggctgaaatcatcattaaagcggtgaactgccgagtaggtagctgataacggatccgaattcgagcgaaggagatatacatatgtttttgcaaagacctaaaccttacagcgatgaaagtttagaaagtttctttatccgagtggctaacaaaaatggctacggtgatgtccatcgcttcctagaagccactaaacgattccttcaagacattgaccataatggctatcaaacctttccgactgatataactcggataaacccatactcagctaaaaacagttccagcgcacgaactgcgtcattcctgaaacttgcacaattgacatttaatgaaccgccagagctacttgggttggcaattaacagaacaaacatgaaatactcgccgtcaactagcgcggttgttagaggtgcagaagtctttcctcgcagtttactacggacgcactccatcccctgctgtcctttgtgtctgcgagaaaatggctacgcctcctacctttggcactttcaggggtacgaatactgccacagccataacgtacctttaattaccacttgtagctgtggtaaggagtttgactaccgagtatctgggttaaagggcatttgctgcaaatgcaaggagcctatcaccttaaccagcagggagaacggtcatgaggcagcgtgtactgtttcaaactggcttgctggccatgaatctaaacctctgccaaatcttcctaaaagctaccgatggggtttagttcattggtggatgggtattaaagatagcgagttcgatcacttttcgttcgttcaatttttctcaaactggccaaggtcattccactcgataatcgaagatgaagtagagttcaaccttgagcatgctgttgtcagcacgtctgaattacgactaaaagatcttcttggtcgattgtttttcggttcaattcggttacctgagcggaatcttcaacacaatatcatccttggtgagcttctctgctatttagaaaatcgtttatggcaagacaagggattaatcgccaacctcaaaatgaacgcgttagaggcgactgtaatgttaaattgtagcctcgatcagattgcatcaatggttgaacaacgcatcttgaagccaaatcgaaaaagcaagcccaacagccctcttgatgttaccgattatctatttcatttcggcgatattttctgtctttggttagctgagttccaaagcgatgagtttaaccgttcgttttatgtgtcgaggtggtaaatgcaaactctgaaagaactaatcgcatccaatcctgacgacttaacaactgaacttaagagagcatttcgtccactcacaccgcatattgcaattgatggtaatgaacttgacgcactgacgatattagtcaatttaaccgataagactgatgatcagaaagacctgctcgatcgagccaaatgcaagcaaaaacttcgagatgaaaaatggtgggctagctgcataaattgcgttaattacagacaaagccataacccaaaattcccggatatacgttctgaaggcgtgattcgaacccaagccctgggtgaattaccgagtttcctactctcgtcctcaaaaatcccaccataccattggtcatatagccatgattcaaaatacgtcaacaaaagcgcattcctcaccaatgagttttgttgggatggtgagatctcatgtttgggtgagcttcttaaagatgcagatcacccactttggaatactttgaaaaagttaggttgttctcaaaaaacttgcaaagcaatggcaaaacaactagctgatattactctcacgactatcaatgtcacactcgcaccaaattacctgactcaaatatctctccccgatagtgatacatcctacatttcactctctcctgttgcatcgctatcgatgcaaagccactttcatcagaggctccaagatgaaaatcggcatagcgcgataacgcggtttagccgaactaccaacatgggggtcactgcgatgacatgtggcggcgcatttagaatgttaaagtctggcgctaagttttccagcccccctcatcaccgattaaacagtaaacgaagttggttgacgtcagagcatgttcagtcattaaaacagtaccagcgcctcaacaaaagcctcatacctgaaaactctcggattgcactccgtagaaaatacaaaatcgagcttcaaaatatggtcagatcttggtttgcaatgcaagaccatacccttgattcgaacatacttatccaacatttgaatcatgacctatcttacttaggagccacaaaacgttttgcatacgatccagcgatgaccaagctctttactgagcttttgaaacgagagttatcaaattcaatcaataatggtgagcaacacactaatggatcgtttttagtcctaccgaatatcagggtttgtggcgcaacagctttaagctccccggtaacggtggggattccatcacttacagctttctttggcttcgttcacgcatttgaacggaatataaatcgcaccacctcatcgtttcgtgttgaatcctttgcgatatgcgtccatcaactacatgtcgagaagcgaggtttgacagcagagtttgtggaaaaaggcgacgggactatatccgctcccgcgacccgggatgactggcagtgtgatgtcgtatttagccttattttgaacaccaactttgctcaacatattgaccaagatacgttagttacatcactaccaaagcgattggctcggggttcagcaaaaattgcgattgatgactttaaacatatcaactcattctcgacattagaaacagcgatcgaatctctgccaatagaagctggtaggtggttatcactttacgcacagtcaaacaataatctaagtgatctattagcagccatgacagaggaccatcagctcatggcaagctgcgtcggttaccacttgttagaagagcccaaagataaaccaaactccctcagaggttacaaacacgctatcgccgagtgcatcattggactcattaactcaatcacctttagctcagagactgatcccaacacaatcttttggtcgctaaagaactatcaaaactacctagtggtacagccaaggagtatcaacgatgaaactaccgacaaatctagcctatgagcgctctatcgacccatcagatgtctgtttttttgtcgtctggcccgatgatagaaaaacacctttaacctacaattctcgtactctgctcgggcaaatggaagcggcatcattagcctatgatgtctcaggtcaaccaataaaaagtgccaccgctgaggcgttagctcaagggaaccctcatcaagttgatttctgccacgttccatacggtgcgagtcatattgaatgcagtttctccgtctcgttttcttctgaactacgtcaaccatataagtgtaactcaagcaaagttaaacaaacgctagtgcaattagtcgagctctacgaaacgaaaatcggctggactgagctagcaacccgatatttgatgaacatttgcaacggtaaatggctgtggaaaaatacccgtaaagcctattgctggaacattgtacttacaccttggccttggaacggggaaaaggttggatttgaagatattcgtactaactacacctcacggcaagactttaaaaataataaaaattggtctgctatagttgaaatgatcaaaaccgcattttctagtactgatgggctggcgatatttgaagtcagggccaccttgcacttgccaacgaatgctatggtgcggccaagccaagttttcacagaaaaagaaagtggcagtaaaagtaaatctaaaactcaaaacagtcgagtttttcagagtacaactattgatggtgaacgatcgccaatactaggggcctttaaaacgggagcagctattgcaaccattgacgactggtatcctgaagccactgagccactaagggtcggacggtttggggttcatcgcgaagatgtcacttgctaccgtcatccgtctaccggaaaagattttttctcgatattacaacaagcagagcactatattgaagtgttgagcgccaacaaaactcccgctcaagaaactatcaacgacatgcactttttaatggctaacctgattaagggtgggatgttccagcataaaggagactgactgtgaaatggtattataagacaatcacctttctgccagagttgtgcaacaacgagtcactggctgcaaagtgtctccgcgttctgcatggatttaactatcagtatgagacacgaaatatcggcgtttcatttccgctttggtgtgatgcaacggttggaaaaaagatttcatttgtcagcaagaacaagatagaactcgacttactacttaaacaacactatttcgtccaaatggaacaacttcaatactttcatatatccaacactgttctcgtcccagaagattgtacatacgtttcctttagacgctgtcaatctatagataagctcacagcagcagggctggcaaggaaaatcagacgcctggagaaacgtgctctatctagaggcgagcaatttgacccatcatcttttgctcaaaaagagcatactgcaatagcgcactaccactcacttggggagtccagcaaacagacgaaccgcaactttcgactcaatatcaggatgctctcggagcaaccccgtgaggggaactcgatttttagtagctatggcttatcaaattcagaaaactcgtttcagcctgtacccttaatctgacctttaataaggagatataccatggcgacaagtttacctacgccctcagcaattacgacttcggcgttagagtatgcattccatactcccgctcgcaatctaacgaaatctcgcggaaaaaacattcatcgttatgtcagtgtaaagatgagtaagaggattacggtagaatctactctagagtgtgatgcctgctatcactttgattttgagccaagtattgttcgcttttgcgctcaaccgattcgatttttatattatctcaatggtcagtctcactcctatgttcctgactttctagttcaatttgataccaacgagtttgttctatatgaagtaaagtcagcttatgctaagaacaaacctgattttgatgttgaatgggaggcgaaagtaaaagcagcaactgaactagggctagaattggagcttgttgaagagagtgatattagggatacggttgtattaaataatcttaagcgcatgcatcgttatgcttcgaaagatgagctgaataacgtacataactctctcttaaaaataataaagtacaatggcgcccaatctgcaagatgcttgggagaacagttgggtttaaaaggccgaactgttttaccaattttgtgcgatttgctgtcaaggtgtttactcgatacacgtttggataagcctctatctcttgaatctcgatttgagttggccagttatggctaagaaagggttctcaagtttccatagaaaagcagtctcttcccaagatacgcttgaatcgatagagcttgtctctagcgctaattgtctagaaagtgttacgtatcaagatatatcagcatttcccgaaacaattgcggtagagattaatttccgattaagcattcttcgctttttagcgcgaaagtgcgaaaccattgtggccaaatcaattgaaccacatcgtgtagagctacagcaaaactatagtagaaaaatacccagtgcaataacgatatatcgatggtggcttgcttttcgaaaatcagactacaaccccattagcttagcacctaatatcaaggatagaggtaatagagagacaaaagtgtcaacagttgttgattctattatggaacaggcagttgaaagagttatatctggacgaaaagtcaatgttagctctgcatataaacgtgttcgacgaaaagttcgtcaatacaatctaactcatggaacgaaatacacgtatcctaagtacgaatctgtaagaaagcgagtaaaaaagaaaaccccatttgagttattagccgcagggaaaggggagagagtagctaagagagagtttcgccgaatgggaaaaaagatcctcacgtctagcgtgctagagagggttgaaatagatcacactgtcgttgacctttttgcagtacacgaagagtatcgaatcccattgggccgaccttggcttactcaattggttgattgttacagtaaagctgtaatcggtttttatttaggtttcgagcctcctagctatgtgtcggtttcccttgcacttaagaatgcaatacaacgcaaagatgacttaatctcctcgtatgaatcgatcgagaatgaatggctatgttatggcatcccagacctactcgtaactgataatggtaaagagtttttgtcgaaagcatttgatcaagcatgtgaatcactattgatcaatgtgcatcaaaataaagttgagacgcccgacaacaaacctcatgttgaacgtaactacgggactattaatacttctctgttagacgatttacctgggaaatccttcagccagtaccttcaaagagaagggtacgactctgtgggagaagctacccttacactcaatgagattagagaaatttacttaatttggttggtggatatttatcataaaaaacccaatcagagaggcactaattgtcctaatgttgcgtggaaaaagggttgtcaagaatgggaaccagaggagttctctggttctaaagacgaattagactttaaatttgctattgttgattacaaacaacttactaaagtagggataactgtctacaaagaactgagttatagcaatgaccgtttagctgaatatagagggaagaaaggaaaccataaagttcagttcaagtataaccctgagtgtatggcagttatttgggtgttggatgaggatatgaatgagtactttacagttaatgcgattgactacgaatatgcaagtagagtatcactttggcaacataaatataacatgaaatatcaagcagaactaaattcagcagaatatgatgaggacaaggaaattgatgcagaaataaaaattgaagaaatcgcagatcgttcaattgttaagactaacaaaatcagagctcggaggcgtggcgctaggcatcaagagaatagcgcaagggctaagtcaatcagtaatgcgaacccggcctcgatacaaaaacatgaagatgaaatcgttagtgcagataatgacgattgggatattgattatgtctgagaaatcgtcaaatgagtgaaacgcgtgaggctcgtatatcaagagctaaaagggcatttgtatccacaccgagcgttaggaaaatcttgagttacatggatagatgtagagatctatcagacctagagtctgagcctacatgcatgatggtctatggtgcttcgggtgtaggtaaaacgaccgtcatcaagaaatacttaaatcaaaacagaagagagtccgaagccgggggcgatataataccggttttgcatattgagttgccagacaatgcgaagccagtagatgcagcaagggaattgctggttgaaatgggtgacccgctagcactttatgaaactgacttagctagattgacgaaaagactgactgaattaatccctgcggtcggcgtgaagctgattattatcgatgagttccaacatttggtggaagaaaggtcaaatcgggttcttacccaagtaggtaattggctaaaaatgatacttaacaaaacgaaatgtccaattgttatatttggtatgccatactcaaaagttgtactgcaagcaaactcgcaacttcacgggcgattttccattcaggttgaactgcgcccctttagctaccagggaggtagaggtgtatttaaaacttttttggaataccttgataaagccctaccttttgaaaaacaggctggcttagccaacgaaagtttgcagaaaaaattgtatgcattctctcagggaaacatgcgttcgttgagaaaccttatttatcaagcatctatcgaagcaattgataatcagcatgagacgataaccgaagaagatttcgtttttgcatcgaagttgacatcgggcgataaacccaactcatggaaaaatccttttgaggagggtgttgaggtaacagaagatatgttacgaccgccaccaaaagatattggttgggaggactatttgagacattcaaccccgagagtgagtaaaccaggtagaaataaaaactttttcgaataacctaggctgctgcgctgctgccaccgctgagcaataactagcataaccccttggggcctctaaacgggtcttgaggggttttttgctgaaacctcaggcatttgttgttgatacaaccataaaatgataattacacccataaattgataattatcacacccataaattgatattgcctcttcatggtctaaacttcagtaagtttacgacattttcctcgaggtcatttccggggatccatggagaaaaaaatcactggatataccaccgttgatatatcccaatggcatcgtaaagaacattttgaggcatttcagtcagttgctcaatgtacctataaccagaccgttcagctggatattacggcctttttaaagaccgtaaagaaaaataagcacaagttttatccggcctttattcacattcttgcccgcctgatgaatgctcatccggagttccgtatggcaatgaaagacggtgagctggtgatatgggatagtgttcacccttgttacaccgttttccatgagcaaactgaaacgttttcatcgctctggagtgaataccacgacgatttccggcagtttctacacatatattcgcaagatgtggcgtgttacggtgaaaacctggcctatttccctaaagggtttattgagaatatgtttttcgtctcagccaatccctgggtgagtttcaccagttttgatttaaacgtggccaatatggacaacttcttcgcccccgttttcactatgggcaaatattatacgcaaggcgacaaggtgctgatgccgctggcgattcaggttcatcatgccgtttgtgatggcttccatgtcggcagaatgcttaatgaattacaacagtactgcgatgagtggcagggcggggcgtaatttttttaaggcagttattggtgcccttctagagtccttactgcagtagttttgctgaaatactcgattcacaaaaatatcaacttatggttgttttgtgagatatcaatatatggttgttttgtggttaagttgctgattataaataattattaaatatcactttatggttgcatcaacaggtaccgagctcgaattcactggccgtcgttttacaacgtcgtgactgggaaaaccctggcgttacccaacttaatcgccttgctatcgtggccggatcttgcggcccctcggcttgaacgaattgttagacattatttgccgactaccttggtgatctcgcctttcacgtagtggacaaattcttccaactgatctgcgcgcgaggccaagcgatcttcttcttgtccaagataagcctgtctagcttcaagtatgacgggctgatactgggccggcaggcgctccattgcccagtcggcagcgacatccttcggcgcgattttgccggttactgcgctgtaccaaatgcgggacaacgtaagcactacatttcgctcatcgccagcccagtcgggcggcgagttccatagcgttaaggtttcatttagcgcctcaaatagatcctgttcaggaaccggatcaaagagttcctccgccgctggacctaccaaggcaacgctatgttctcttgcttttgtcagcaagatagccagatcaatgtcgatcgtggctggctcgaagatacctgcaagaatgtcattgcgctgccattctccaaattgcagttcgcgcttagctggataacgccacggaatgatgtcgtcgtgcacaacaatggtgacttctacagcgcggagaatctcgctctctccaggggaagccgaagtttccaaaaggtcgttgatcaaagctcgccgcgttgtttcatcaagccttacggtcaccgtaaccagcaaatcaatatcactgtgtggcttcaggccgccatccactgcggagccgtacaaatgtacggccagcaacgtcggttcgagatggcgctcgatgacgccaactacctctgatagttgagtcgatacttcggcgatcaccgcttccctcatactcttcctttttcaatattattgaagcatttatcagggttattgtctcatgagcggatacatatttgaatgtatttagaaaaataaacaaatagctagctcactcggtcgctacgctccgggcgtgagactgcggcgggcgctgcggacacatacaaagttacccacagattccgtggataagcaggggactaacatgtgaggcaaaacagcagggccgcgccggtggcgtttttccataggctccgccctcctgccagagttcacataaacagacgcttttccggtgcatctgtgggagccgtgaggctcaaccatgaatctgacagtacgggcgaaacccgacaggacttaaagatccccaccgtttccggcgggtcgctccctcttgcgctctcctgttccgaccctgccgtttaccggatacctgttccgcctttctcccttacgggaagtgtggcgctttctcatagctcacacactggtatctcggctcggtgtaggtcgttcgctccaagctgggctgtaagcaagaactccccgttcagcccgactgctgcgccttatccggtaactgttcacttgagtccaacccggaaaagcacggtaaaacgccactggcagcagccattggtaactgggagttcgcagaggatttgtttagctaaacacgcggttgctcttgaagtgtgcgccaaagtccggctacactggaaggacagatttggttgctgtgctctgcgaaagccagttaccacggttaagcagttccccaactgacttaaccttcgatcaaaccacctccccaggtggttttttcgtttacagggcaaaagattacgcgcagaaaaaaaggatctcaagaagatcctttgatcttttctactgaaccgctctagatttcagtgcaatttatctcttcaaatgtagcacctgaagtcagccccatacgatataagttgtaattctcatgttagtcatgccccgcgcccaccggaaggagctgactgggttgaaggctctcaagggcatcggtcgagatcccggtgcctaatgagtgagctaacttacattaattgcgttgcgctcactgcccgctttccagtcgggaaacctgtcgtgccagctgcattaatgaatcggccaacgcgcggggagaggcggtttgcgtattgggcgccagggtggtttttcttttcaccagtgagacgggcaacagctgattgcccttcaccgcctggccctgagagagttgcagcaagcggtccacgctggtttgccccagcaggcgaaaatcctgtttgatggtggttaacggcgggatataacatgagctgtcttcggtatcgtcgtatcccactaccgagatgtccgcaccaacgcgcagcccggactcggtaatggcgcgcattgcgcccagcgccatctgatcgttggcaaccagcatcgcagtgggaacgatgccctcattcagcatttgcatggtttgttgaaaaccggacatggcactccagtcgccttcccgttccgctatcggctgaatttgattgcgagtgagatatttatgccagccagccagacgcagacgcgccgagacagaacttaatgggcccgctaacagcgcgatttgctggtgacccaatgcgaccagatgctccacgcccagtcgcgtaccgtcttcatgggagaaaataatactgttgatgggtgtctggtcagagacatcaagaaataacgccggaacattagtgcaggcagcttccacagcaatggcatcctggtcatccagcggatagttaatgatcagcccactgacgcgttgcgcgagaagattgtgcaccgccgctttacaggcttcgacgccgcttcgttctaccatcgacaccaccacgctggcacccagttgatcggcgcgagatttaatcgccgcgacaatttgcgacggcgcgtgcagggccagactggaggtggcaacgccaatcagcaacgactgtttgcccgccagttgttgtgccacgcggttgggaatgtaattcagctccgccatcgccgcttccactttttcccgcgttttcgcaga

SEQ ID NO: 19 - DNA, 12980 bp, artificial sequence
  Synthetic
gctcagaagaactcgtcaagaaggcgatagaaggcgatgcgctgcgaatcgggagcggcgataccgtaaagcacgaggaagcggtcagcccattcgccgccaagctcttcagcaatatcacgggtagccaacgctatgtcctgatagcggtccgccacacccagccggccacagtcgatgaatccagaaaagcggccattttccaccatgatattcggcaagcaggcatcgccatgggtcacgacgagatcctcgccgtcgggcatgcgcgccttgagcctggcgaacagttcggctggcgcgagcccctgatgctcttcgtccagatcatcctgatcgacaagaccggcttccatccgagtacgtgctcgctcgatgcgatgtttcgcttggtggtcgaatgggcaggtagccggatcaagcgtatgcagccgccgcattgcatcagccatgatggatactttctcggcaggagcaaggtgagatgacaggagatcctgccccggcacttcgcccaatagcagccagtcccttcccgcttcagtgacaacgtcgagcacagctgcgcaaggaacgcccgtcgtggccagccacgatagccgcgctgcctcgtcttgcagttcattcagggcaccggacaggtcggtcttgacaaaaagaaccgggcgcccctgcgctgacagccggaacacggcggcatcagagcagccgattgtctgttgtgcccagtcatagccgaatagcctctccacccaagcggccggagaacctgcgtgcaatccatcttgttcaatcatactccttcctttttcaatattattgaagcatttatcagggttattgtctcatgagcggatacatatttgaatgtatttagaaaaataaacaaataggggttccgcgcacatttccccgaaaagtgccacctgacgtctaagaaaccattattatcatgacattaacctataaaaataggcgtatcacgaggcagaatttcagataaaaaaaatccttagctttcgctaaggatgatttctggtggataaccgtattaccgcctttgagtgagctgataccgctcgccgcagccgaactaccgagcgcagcgagtcagtgagcgaggagcgactcctgcattaggaaattaatacgactcactataggggaattgtgagcggataacaattcccctgtagaaataactcgacgtggagatataccatgggtgaactgccgagtaggtagctgataacagtacagcgcggctgaaatcatcattaaagcggtgaactgccgagtaggtagctgataacggatccgaattcgagcgaaggagatatacatatgtttttgcaaagacctaaaccttacagcgatgaaagtttagaaagtttctttatccgagtggctaacaaaaatggctacggtgatgtccatcgcttcctagaagccactaaacgattccttcaagacattgaccataatggctatcaaacctttccgactgatataactcggataaacccatactcagctaaaaacagttccagcgcacgaactgcgtcattcctgaaacttgcacaattgacatttaatgaaccgccagagctacttgggttggcaattaacagaacaaacatgaaatactcgccgtcaactagcgcggttgttagaggtgcagaagtctttcctcgcagtttactacggacgcactccatcccctgctgtcctttgtgtctgcgagaaaatggctacgcctcctacctttggcactttcaggggtacgaatactgccacagccataacgtacctttaattaccacttgtagctgtggtaaggagtttgactaccgagtatctgggttaaagggcatttgctgcaaatgcaaggagcctatcaccttaaccagcagggagaacggtcatgaggcagcgtgtactgtttcaaactggcttgctggccatgaatctaaacctctgccaaatcttcctaaaagctaccgatggggtttagttcattggtggatgggtattaaagatagcgagttcgatcacttttcgttcgttcaatttttctcaaactggccaaggtcattccactcgataatcgaagatgaagtagagttcaaccttgagcatgctgttgtcagcacgtctgaattacgactaaaagatcttcttggtcgattgtttttcggttcaattcggttacctgagcggaatcttcaacacaatatcatccttggtgagcttctctgctatttagaaaatcgtttatggcaagacaagggattaatcgccaacctcaaaatgaacgcgttagaggcgactgtaatgttaaattgtagcctcgatcagattgcatcaatggttgaacaacgcatcttgaagccaaatcgaaaaagcaagcccaacagccctcttgatgttaccgattatctatttcatttcggcgatattttctgtctttggttagctgagttccaaagcgatgagtttaaccgttcgttttatgtgtcgaggtggtaaatgcaaactctgaaagaactaatcgcatccaatcctgacgacttaacaactgaacttaagagagcatttcgtccactcacaccgcatattgcaattgatggtaatgaacttgacgcactgacgatattagtcaatttaaccgataagactgatgatcagaaagacctgctcgatcgagccaaatgcaagcaaaaacttcgagatgaaaaatggtgggctagctgcataaattgcgttaattacagacaaagccataacccaaaattcccggatatacgttctgaaggcgtgattcgaacccaagccctgggtgaattaccgagtttcctactctcgtcctcaaaaatcccaccataccattggtcatatagccatgattcaaaatacgtcaacaaaagcgcattcctcaccaatgagttttgttgggatggtgagatctcatgtttgggtgagcttcttaaagatgcagatcacccactttggaatactttgaaaaagttaggttgttctcaaaaaacttgcaaagcaatggcaaaacaactagctgatattactctcacgactatcaatgtcacactcgcaccaaattacctgactcaaatatctctccccgatagtgatacatcctacatttcactctctcctgttgcatcgctatcgatgcaaagccactttcatcagaggctccaagatgaaaatcggcatagcgcgataacgcggtttagccgaactaccaacatgggggtcactgcgatgacatgtggcggcgcatttagaatgttaaagtctggcgctaagttttccagcccccctcatcaccgattaaacagtaaacgaagttggttgacgtcagagcatgttcagtcattaaaacagtaccagcgcctcaacaaaagcctcatacctgaaaactctcggattgcactccgtagaaaatacaaaatcgagcttcaaaatatggtcagatcttggtttgcaatgcaagaccatacccttgattcgaacatacttatccaacatttgaatcatgacctatcttacttaggagccacaaaacgttttgcatacgatccagcgatgaccaagctctttactgagcttttgaaacgagagttatcaaattcaatcaataatggtgagcaacacactaatggatcgtttttagtcctaccgaatatcagggtttgtggcgcaacagctttaagctccccggtaacggtggggattccatcacttacagctttctttggcttcgttcacgcatttgaacggaatataaatcgcaccacctcatcgtttcgtgttgaatcctttgcgatatgcgtccatcaactacatgtcgagaagcgaggtttgacagcagagtttgtggaaaaaggcgacgggactatatccgctcccgcgacccgggatgactggcagtgtgatgtcgtatttagccttattttgaacaccaactttgctcaacatattgaccaagatacgttagttacatcactaccaaagcgattggctcggggttcagcaaaaattgcgattgatgactttaaacatatcaactcattctcgacattagaaacagcgatcgaatctctgccaatagaagctggtaggtggttatcactttacgcacagtcaaacaataatctaagtgatctattagcagccatgacagaggaccatcagctcatggcaagctgcgtcggttaccacttgttagaagagcccaaagataaaccaaactccctcagaggttacaaacacgctatcgccgagtgcatcattggactcattaactcaatcacctttagctcagagactgatcccaacacaatcttttggtcgctaaagaactatcaaaactacctagtggtacagccaaggagtatcaacgatgaaactaccgacaaatctagcctatgagcgctctatcgacccatcagatgtctgtttttttgtcgtctggcccgatgatagaaaaacacctttaacctacaattctcgtactctgctcgggcaaatggaagcggcatcattagcctatgatgtctcaggtcaaccaataaaaagtgccaccgctgaggcgttagctcaagggaaccctcatcaagttgatttctgccacgttccatacggtgcgagtcatattgaatgcagtttctccgtctcgttttcttctgaactacgtcaaccatataagtgtaactcaagcaaagttaaacaaacgctagtgcaattagtcgagctctacgaaacgaaaatcggctggactgagctagcaacccgatatttgatgaacatttgcaacggtaaatggctgtggaaaaatacccgtaaagcctattgctggaacattgtacttacaccttggccttggaacggggaaaaggttggatttgaagatattcgtactaactacacctcacggcaagactttaaaaataataaaaattggtctgctatagttgaaatgatcaaaaccgcattttctagtactgatgggctggcgatatttgaagtcagggccaccttgcacttgccaacgaatgctatggtgcggccaagccaagttttcacagaaaaagaaagtggcagtaaaagtaaatctaaaactcaaaacagtcgagtttttcagagtacaactattgatggtgaacgatcgccaatactaggggcctttaaaacgggagcagctattgcaaccattgacgactggtatcctgaagccactgagccactaagggtcggacggtttggggttcatcgcgaagatgtcacttgctaccgtcatccgtctaccggaaaagattttttctcgatattacaacaagcagagcactatattgaagtgttgagcgccaacaaaactcccgctcaagaaactatcaacgacatgcactttttaatggctaacctgattaagggtgggatgttccagcataaaggagactgactgtgaaatggtattataagacaatcacctttctgccagagttgtgcaacaacgagtcactggctgcaaagtgtctccgcgttctgcatggatttaactatcagtatgagacacgaaatatcggcgtttcatttccgctttggtgtgatgcaacggttggaaaaaagatttcatttgtcagcaagaacaagatagaactcgacttactacttaaacaacactatttcgtccaaatggaacaacttcaatactttcatatatccaacactgttctcgtcccagaagattgtacatacgtttcctttagacgctgtcaatctatagataagctcacagcagcagggctggcaaggaaaatcagacgcctggagaaacgtgctctatctagaggcgagcaatttgacccatcatcttttgctcaaaaagagcatactgcaatagcgcactaccactcacttggggagtccagcaaacagacgaaccgcaactttcgactcaatatcaggatgctctcggagcaaccccgtgaggggaactcgatttttagtagctatggcttatcaaattcagaaaactcgtttcagcctgtacccttaatctgacctttaataaggagatataccatggcgacaagtttacctacgccctcagcaattacgacttcggcgttagagtatgcattccatactcccgctcgcaatctaacgaaatctcgcggaaaaaacattcatcgttatgtcagtgtaaagatgagtaagaggattacggtagaatctactctagagtgtgatgcctgctatcactttgattttgagccaagtattgttcgcttttgcgctcaaccgattcgatttttatattatctcaatggtcagtctcactcctatgttcctgactttctagttcaatttgataccaacgagtttgttctatatgaagtaaagtcagcttatgctaagaacaaacctgattttgatgttgaatgggaggcgaaagtaaaagcagcaactgaactagggctagaattggagcttgttgaagagagtgatattagggatacggttgtattaaataatcttaagcgcatgcatcgttatgcttcgaaagatgagctgaataacgtacataactctctcttaaaaataataaagtacaatggcgcccaatctgcaagatgcttgggagaacagttgggtttaaaaggccgaactgttttaccaattttgtgcgatttgctgtcaaggtgtttactcgatacacgtttggataagcctctatctcttgaatctcgatttgagttggccagttatggctaagaaagggttctcaagtttccatagaaaagcagtctcttcccaagatacgcttgaatcgatagagcttgtctctagcgctaattgtctagaaagtgttacgtatcaagatatatcagcatttcccgaaacaattgcggtagagattaatttccgattaagcattcttcgctttttagcgcgaaagtgcgaaaccattgtggccaaatcaattgaaccacatcgtgtagagctacagcaaaactatagtagaaaaatacccagtgcaataacgatatatcgatggtggcttgcttttcgaaaatcagactacaaccccattagcttagcacctaatatcaaggatagaggtaatagagagacaaaagtgtcaacagttgttgattctattatggaacaggcagttgaaagagttatatctggacgaaaagtcaatgttagctctgcatataaacgtgttcgacgaaaagttcgtcaatacaatctaactcatggaacgaaatacacgtatcctaagtacgaatctgtaagaaagcgagtaaaaaagaaaaccccatttgagttattagccgcagggaaaggggagagagtagctaagagagagtttcgccgaatgggaaaaaagatcctcacgtctagcgtgctagagagggttgaaatagatcacactgtcgttgacctttttgcagtacacgaagagtatcgaatcccattgggccgaccttggcttactcaattggttgattgttacagtaaagctgtaatcggtttttatttaggtttcgagcctcctagctatgtgtcggtttcccttgcacttaagaatgcaatacaacgcaaagatgacttaatctcctcgtatgaatcgatcgagaatgaatggctatgttatggcatcccagacctactcgtaactgataatggtaaagagtttttgtcgaaagcatttgatcaagcatgtgaatcactattgatcaatgtgcatcaaaataaagttgagacgcccgacaacaaacctcatgttgaacgtaactacgggactattaatacttctctgttagacgatttacctgggaaatccttcagccagtaccttcaaagagaagggtacgactctgtgggagaagctacccttacactcaatgagattagagaaatttacttaatttggttggtggatatttatcataaaaaacccaatcagagaggcactaattgtcctaatgttgcgtggaaaaagggttgtcaagaatgggaaccagaggagttctctggttctaaagacgaattagactttaaatttgctattgttgattacaaacaacttactaaagtagggataactgtctacaaagaactgagttatagcaatgaccgtttagctgaatatagagggaagaaaggaaaccataaagttcagttcaagtataaccctgagtgtatggcagttatttgggtgttggatgaggatatgaatgagtactttacagttaatgcgattgactacgaatatgcaagtagagtatcactttggcaacataaatataacatgaaatatcaagcagaactaaattcagcagaatatgatgaggacaaggaaattgatgcagaaataaaaattgaagaaatcgcagatcgttcaattgttaagactaacaaaatcagagctcggaggcgtggcgctaggcatcaagagaatagcgcaagggctaagtcaatcagtaatgcgaacccggcctcgatacaaaaacatgaagatgaaatcgttagtgcagataatgacgattgggatattgattatgtctgagaaatcgtcaaatgagtgaaacgcgtgaggctcgtatatcaagagctaaaagggcatttgtatccacaccgagcgttaggaaaatcttgagttacatggatagatgtagagatctatcagacctagagtctgagcctacatgcatgatggtctatggtgcttcgggtgtaggtaaaacgaccgtcatcaagaaatacttaaatcaaaacagaagagagtccgaagccgggggcgatataataccggttttgcatattgagttgccagacaatgcgaagccagtagatgcagcaagggaattgctggttgaaatgggtgacccgctagcactttatgaaactgacttagctagattgacgaaaagactgactgaattaatccctgcggtcggcgtgaagctgattattatcgatgagttccaacatttggtggaagaaaggtcaaatcgggttcttacccaagtaggtaattggctaaaaatgatacttaacaaaacgaaatgtccaattgttatatttggtatgccatactcaaaagttgtactgcaagcaaactcgcaacttcacgggcgattttccattcaggttgaactgcgcccctttagctaccagggaggtagaggtgtatttaaaacttttttggaataccttgataaagccctaccttttgaaaaacaggctggcttagccaacgaaagtttgcagaaaaaattgtatgcattctctcagggaaacatgcgttcgttgagaaaccttatttatcaagcatctatcgaagcaattgataatcagcatgagacgataaccgaagaagatttcgtttttgcatcgaagttgacatcgggcgataaacccaactcatggaaaaatccttttgaggagggtgttgaggtaacagaagatatgttacgaccgccaccaaaagatattggttgggaggactatttgagacattcaaccccgagagtgagtaaaccaggtagaaataaaaactttttcgaataacctaggctgctgcgctgctgccaccgctgagcaataactagcataaccccttggggcctctaaacgggtcttgaggggttttttgctgaaacctcaggcatttgttgttgatacaaccataaaatgataattacacccataaattgataattatcacacccataaattgatattgcctcttcatggtctaaacttcagtaagtttacgacattttcctcgaggtcatttccggggatccatggagaaaaaaatcactggatataccaccgttgatatatcccaatggcatcgtaaagaacattttgaggcatttcagtcagttgctcaatgtacctataaccagaccgttcagctggatattacggcctttttaaagaccgtaaagaaaaataagcacaagttttatccggcctttattcacattcttgcccgcctgatgaatgctcatccggagttccgtatggcaatgaaagacggtgagctggtgatatgggatagtgttcacccttgttacaccgttttccatgagcaaactgaaacgttttcatcgctctggagtgaataccacgacgatttccggcagtttctacacatatattcgcaagatgtggcgtgttacggtgaaaacctggcctatttccctaaagggtttattgagaatatgtttttcgtctcagccaatccctgggtgagtttcaccagttttgatttaaacgtggccaatatggacaacttcttcgcccccgttttcactatgggcaaatattatacgcaaggcgacaaggtgctgatgccgctggcgattcaggttcatcatgccgtttgtgatggcttccatgtcggcagaatgcttaatgaattacaacagtactgcgatgagtggcagggcggggcgtaatttttttaaggcagttattggtgcccttctagagtccttactgcagtagttttgctgaaatactcgattcacaaaaatatcaacttatggttgttttgtgagatatcaatatatggttgttttgtggttaagttgctgattataaataattattaaatatcactttatggttgcatcaacaggtaccgagctcgaattcactggccgtcgttttacaacgtcgtgactgggaaaaccctggcgttacccaacttaatcgccttgcgtataatctagtagctgcggaatcgacgttttagagctagaaatagcaagttaaaataaggctagtccgttatcaacttgaaaaagtggcaccgagtcggtgctttttttataaaacgaaaggctcagtcgaaagactgggcctttcgttttatccgaatacgggttcttgcatgttacattgtcgatctgttcatggtgaacagctttgaatgcaccaaaaactcgtaaaagctctgatgtatctatcttttttacaccgttttcatctgtgcatatggacagttttccctttgatatgtaacggtgaacagttgttctacttttgtttgttagtcttgatgcttcactgatagatacaagagccataagaacctcagatccttccgtatttagccagtatgttctctagtgtggttcgttgtttttgcgtgagccatgagaacgaaccattgagatcatgcttactttgcatgtcactcaaaaattttgcctcaaaactggtgagctgaatttttgcagttaaagcatcgtgtagtgtttttcttagtccgttacgtaggtaggaatctgatgtaatggttgttggtattttgtcaccattcatttttatctggttgttctcaagttcggttacgagatccatttgtctatctagttcaacttggaaaatcaacgtatcagtcgggcggcctcgcttatcaaccaccaatttcatattgctgtaagtgtttaaatctttacttattggtttcaaaacccattggttaagccttttaaactcatggtagttattttcaagcattaacatgaacttaaattcatcaaggctaatctctatatttgccttgtgagttttcttttgtgttagttcttttaataaccactcataaatcctcatagagtatttgttttcaaaagacttaacatgttccagattatattttatgaatttttttaactggaaaagataaggcaatatctcttcactaaaaactaattctaatttttcgcttgagaacttggcatagtttgtccactggaaaatctcaaagcctttaaccaaaggattcctgatttccacagttctcgtcatcagctctctggttgctttagctaatacaccataagcattttccctactgatgttcatcatctgagcgtattggttataagtgaacgataccgtccgttctttccttgtagggttttcaatcgtggggttgagtagtgccacacagcataaaattagcttggtttcatgctccgttaagtcatagcgactaatcgctagttcatttgctttgaaaacaactaattcagacatacatctcaattggtctaggtgattttaatcactataccaattgagatgggctagtcaatgataattactagtccttttcccgggagatctgggtatctgtaaattctgctagacctttgctggaaaacttgtaaattctgctagaccctctgtaaattccgctagacctttgtgtgttttttttgtttatattcaagtggttataatttatagaataaagaaagaataaaaaaagataaaaagaatagatcccagccctgtgtataactcactactttagtcagttccgcagtattacaaaaggatgtcgcaaacgctgtttgctcctctacaaaacagaccttaaaaccctaaaggcttaagtagcaccctcgcaagctcgggcaaatcgctgaatattccttttgtctccgaccatcaggcacctgagtcgctgtctttttcgtgacattcagttcgctgcgctcacggctctggcagtgaatgggggtaaatggcactacaggcgccttttatggattcatgcaaggaaactacccataatacaagaaaagcccgtcacgggcttctcagggcgttttatggcgggtctgctatgtggtgctatctgactttttgctgttcagcagttcctgccctctgattttccagtctgaccacttcggattatcccgtgacaggtcattcagactggctaatgcacccagtaaggcagcggtatcatcaacaggcttacccgtcttactgtccctagtgcttggattctcaccaataaaaaacgcccggcggcaaccgagcgttctgaacaaatccagatggagttctgaggtcattactggatctatcaacaggagtccaagcgagctctcgaaccccagagtccc

SEQ ID NO: 20 - DNA, 14340 bp, artificial sequence
  Synthetic
cacaacagacaatcggctgctctgatgccgccgtgttccggctgtcagcgcaggggcgcccggttctttttgtcaagaccgacctgtccggtgccctgaatgaactgcaagacgaggcagcgcggctatcgtggctggccacgacgggcgttccttgcgcagctgtgctcgacgttgtcactgaagcgggaagggactggctgctattgggcgaagtgccggggcaggatctcctgtcatctcaccttgctcctgccgagaaagtatccatcatggctgatgcaatgcggcggctgcatacgcttgatccggctacctgcccattcgaccaccaagcgaaacatcgcatcgagcgagcacgtactcggatggaagccggtcttgtcgatcaggatgatctggacgaagagcatcaggggctcgcgccagccgaactgttcgccaggctcaaggcgcgcatgcccgacggcgaggatctcgtcgtgacccatggcgatgcctgcttgccgaatatcatggtggaaaatggccgcttttctggattcatcgactgtggccggctgggtgtggcggaccgctatcaggacatagcgttggctacccgtgatattgctgaagagcttggcggcgaatgggctgaccgcttcctcgtgctttacggtatcgccgctcccgattcgcagcgcatcgccttctatcgccttcttgacgagttcttctgagcgggactctggggttcgaaatgaccgaccaagcgacgcccaacctgccatcacgagatttcgattccaccgccgccttctatgaaaggttgggcttcggaatcgttttccgggacgccggctggatgatcctccagcgcggggatctcatgctggagttcttcgcccacccccatgggcaaatattatacgcaaggcgacaaggtgctgatgccgctggcgattcaggttcatcatgccgtttgtgatggcttccatgtcggcagaatgcttaatgaattacaacagtttttatgcatgcgcccaatacgcaaaccgcctctccccgcgcgttggccgattcattaatgcagctggcacgacaggtttcccgactggtggataaccgtattaccgcctttgagtgagctgataccgctcgccgcagccgaactaccgagcgcagcgagtcagtgagcgaggagcgactcctgcattaggaaattaatacgactcactataggggaattgtgagcggataacaattcccctgtagaaataattttgtttaactttaataaggagatataccatgggtgaactgccgagtaggtagctgataacagtacagcgcggctgaaatcatcattaaagcggtgaactgccgagtaggtagctgataacggatccgaattcgagcgaaggagatatacatatgtttttgcaaagacctaaaccttacagcgatgaaagtttagaaagtttctttatccgagtggctaacaaaaatggctacggtgatgtccatcgcttcctagaagccactaaacgattccttcaagacattgaccataatggctatcaaacctttccgactgatataactcggataaacccatactcagctaaaaacagttccagcgcacgaactgcgtcattcctgaaacttgcacaattgacatttaatgaaccgccagagctacttgggttggcaattaacagaacaaacatgaaatactcgccgtcaactagcgcggttgttagaggtgcagaagtctttcctcgcagtttactacggacgcactccatcccctgctgtcctttgtgtctgcgagaaaatggctacgcctcctacctttggcactttcaggggtacgaatactgccacagccataacgtacctttaattaccacttgtagctgtggtaaggagtttgactaccgagtatctgggttaaagggcatttgctgcaaatgcaaggagcctatcaccttaaccagcagggagaacggtcatgaggcagcgtgtactgtttcaaactggcttgctggccatgaatctaaacctctgccaaatcttcctaaaagctaccgatggggtttagttcattggtggatgggtattaaagatagcgagttcgatcacttttcgttcgttcaatttttctcaaactggccaaggtcattccactcgataatcgaagatgaagtagagttcaaccttgagcatgctgttgtcagcacgtctgaattacgactaaaagatcttcttggtcgattgtttttcggttcaattcggttacctgagcggaatcttcaacacaatatcatccttggtgagcttctctgctatttagaaaatcgtttatggcaagacaagggattaatcgccaacctcaaaatgaacgcgttagaggcgactgtaatgttaaattgtagcctcgatcagattgcatcaatggttgaacaacgcatcttgaagccaaatcgaaaaagcaagcccaacagccctcttgatgttaccgattatctatttcatttcggcgatattttctgtctttggttagctgagttccaaagcgatgagtttaaccgttcgttttatgtgtcgaggtggtaaatgcaaactctgaaagaactaatcgcatccaatcctgacgacttaacaactgaacttaagagagcatttcgtccactcacaccgcatattgcaattgatggtaatgaacttgacgcactgacgatattagtcaatttaaccgataagactgatgatcagaaagacctgctcgatcgagccaaatgcaagcaaaaacttcgagatgaaaaatggtgggctagctgcataaattgcgttaattacagacaaagccataacccaaaattcccggatatacgttctgaaggcgtgattcgaacccaagccctgggtgaattaccgagtttcctactctcgtcctcaaaaatcccaccataccattggtcatatagccatgattcaaaatacgtcaacaaaagcgcattcctcaccaatgagttttgttgggatggtgagatctcatgtttgggtgagcttcttaaagatgcagatcacccactttggaatactttgaaaaagttaggttgttctcaaaaaacttgcaaagcaatggcaaaacaactagctgatattactctcacgactatcaatgtcacactcgcaccaaattacctgactcaaatatctctccccgatagtgatacatcctacatttcactctctcctgttgcatcgctatcgatgcaaagccactttcatcagaggctccaagatgaaaatcggcatagcgcgataacgcggtttagccgaactaccaacatgggggtcactgcgatgacatgtggcggcgcatttagaatgttaaagtctggcgctaagttttccagcccccctcatcaccgattaaacagtaaacgaagttggttgacgtcagagcatgttcagtcattaaaacagtaccagcgcctcaacaaaagcctcatacctgaaaactctcggattgcactccgtagaaaatacaaaatcgagcttcaaaatatggtcagatcttggtttgcaatgcaagaccatacccttgattcgaacatacttatccaacatttgaatcatgacctatcttacttaggagccacaaaacgttttgcatacgatccagcgatgaccaagctctttactgagcttttgaaacgagagttatcaaattcaatcaataatggtgagcaacacactaatggatcgtttttagtcctaccgaatatcagggtttgtggcgcaacagctttaagctccccggtaacggtggggattccatcacttacagctttctttggcttcgttcacgcatttgaacggaatataaatcgcaccacctcatcgtttcgtgttgaatcctttgcgatatgcgtccatcaactacatgtcgagaagcgaggtttgacagcagagtttgtggaaaaaggcgacgggactatatccgctcccgcgacccgggatgactggcagtgtgatgtcgtatttagccttattttgaacaccaactttgctcaacatattgaccaagatacgttagttacatcactaccaaagcgattggctcggggttcagcaaaaattgcgattgatgactttaaacatatcaactcattctcgacattagaaacagcgatcgaatctctgccaatagaagctggtaggtggttatcactttacgcacagtcaaacaataatctaagtgatctattagcagccatgacagaggaccatcagctcatggcaagctgcgtcggttaccacttgttagaagagcccaaagataaaccaaactccctcagaggttacaaacacgctatcgccgagtgcatcattggactcattaactcaatcacctttagctcagagactgatcccaacacaatcttttggtcgctaaagaactatcaaaactacctagtggtacagccaaggagtatcaacgatgaaactaccgacaaatctagcctatgagcgctctatcgacccatcagatgtctgtttttttgtcgtctggcccgatgatagaaaaacacctttaacctacaattctcgtactctgctcgggcaaatggaagcggcatcattagcctatgatgtctcaggtcaaccaataaaaagtgccaccgctgaggcgttagctcaagggaaccctcatcaagttgatttctgccacgttccatacggtgcgagtcatattgaatgcagtttctccgtctcgttttcttctgaactacgtcaaccatataagtgtaactcaagcaaagttaaacaaacgctagtgcaattagtcgagctctacgaaacgaaaatcggctggactgagctagcaacccgatatttgatgaacatttgcaacggtaaatggctgtggaaaaatacccgtaaagcctattgctggaacattgtacttacaccttggccttggaacggggaaaaggttggatttgaagatattcgtactaactacacctcacggcaagactttaaaaataataaaaattggtctgctatagttgaaatgatcaaaaccgcattttctagtactgatgggctggcgatatttgaagtcagggccaccttgcacttgccaacgaatgctatggtgcggccaagccaagttttcacagaaaaagaaagtggcagtaaaagtaaatctaaaactcaaaacagtcgagtttttcagagtacaactattgatggtgaacgatcgccaatactaggggcctttaaaacgggagcagctattgcaaccattgacgactggtatcctgaagccactgagccactaagggtcggacggtttggggttcatcgcgaagatgtcacttgctaccgtcatccgtctaccggaaaagattttttctcgatattacaacaagcagagcactatattgaagtgttgagcgccaacaaaactcccgctcaagaaactatcaacgacatgcactttttaatggctaacctgattaagggtgggatgttccagcataaaggagactgactgtgaaatggtattataagacaatcacctttctgccagagttgtgcaacaacgagtcactggctgcaaagtgtctccgcgttctgcatggatttaactatcagtatgagacacgaaatatcggcgtttcatttccgctttggtgtgatgcaacggttggaaaaaagatttcatttgtcagcaagaacaagatagaactcgacttactacttaaacaacactatttcgtccaaatggaacaacttcaatactttcatatatccaacactgttctcgtcccagaagattgtacatacgtttcctttagacgctgtcaatctatagataagctcacagcagcagggctggcaaggaaaatcagacgcctggagaaacgtgctctatctagaggcgagcaatttgacccatcatcttttgctcaaaaagagcatactgcaatagcgcactaccactcacttggggagtccagcaaacagacgaaccgcaactttcgactcaatatcaggatgctctcggagcaaccccgtgaggggaactcgatttttagtagctatggcttatcaaattcagaaaactcgtttcagcctgtacccttaatctgacctttaataaggagatataccatggcgacaagtttacctacgccctcagcaattacgacttcggcgttagagtatgcattccatactcccgctcgcaatctaacgaaatctcgcggaaaaaacattcatcgttatgtcagtgtaaagatgagtaagaggattacggtagaatctactctagagtgtgatgcctgctatcactttgattttgagccaagtattgttcgcttttgcgctcaaccgattcgatttttatattatctcaatggtcagtctcactcctatgttcctgactttctagttcaatttgataccaacgagtttgttctatatgaagtaaagtcagcttatgctaagaacaaacctgattttgatgttgaatgggaggcgaaagtaaaagcagcaactgaactagggctagaattggagcttgttgaagagagtgatattagggatacggttgtattaaataatcttaagcgcatgcatcgttatgcttcgaaagatgagctgaataacgtacataactctctcttaaaaataataaagtacaatggcgcccaatctgcaagatgcttgggagaacagttgggtttaaaaggccgaactgttttaccaattttgtgcgatttgctgtcaaggtgtttactcgatacacgtttggataagcctctatctcttgaatctcgatttgagttggccagttatggctaagaaagggttctcaagtttccatagaaaagcagtctcttcccaagatacgcttgaatcgatagagcttgtctctagcgctaattgtctagaaagtgttacgtatcaagatatatcagcatttcccgaaacaattgcggtagagattaatttccgattaagcattcttcgctttttagcgcgaaagtgcgaaaccattgtggccaaatcaattgaaccacatcgtgtagagctacagcaaaactatagtagaaaaatacccagtgcaataacgatatatcgatggtggcttgcttttcgaaaatcagactacaaccccattagcttagcacctaatatcaaggatagaggtaatagagagacaaaagtgtcaacagttgttgattctattatggaacaggcagttgaaagagttatatctggacgaaaagtcaatgttagctctgcatataaacgtgttcgacgaaaagttcgtcaatacaatctaactcatggaacgaaatacacgtatcctaagtacgaatctgtaagaaagcgagtaaaaaagaaaaccccatttgagttattagccgcagggaaaggggagagagtagctaagagagagtttcgccgaatgggaaaaaagatcctcacgtctagcgtgctagagagggttgaaatagatcacactgtcgttgacctttttgcagtacacgaagagtatcgaatcccattgggccgaccttggcttactcaattggttgattgttacagtaaagctgtaatcggtttttatttaggtttcgagcctcctagctatgtgtcggtttcccttgcacttaagaatgcaatacaacgcaaagatgacttaatctcctcgtatgaatcgatcgagaatgaatggctatgttatggcatcccagacctactcgtaactgataatggtaaagagtttttgtcgaaagcatttgatcaagcatgtgaatcactattgatcaatgtgcatcaaaataaagttgagacgcccgacaacaaacctcatgttgaacgtaactacgggactattaatacttctctgttagacgatttacctgggaaatccttcagccagtaccttcaaagagaagggtacgactctgtgggagaagctacccttacactcaatgagattagagaaatttacttaatttggttggtggatatttatcataaaaaacccaatcagagaggcactaattgtcctaatgttgcgtggaaaaagggttgtcaagaatgggaaccagaggagttctctggttctaaagacgaattagactttaaatttgctattgttgattacaaacaacttactaaagtagggataactgtctacaaagaactgagttatagcaatgaccgtttagctgaatatagagggaagaaaggaaaccataaagttcagttcaagtataaccctgagtgtatggcagttatttgggtgttggatgaggatatgaatgagtactttacagttaatgcgattgactacgaatatgcaagtagagtatcactttggcaacataaatataacatgaaatatcaagcagaactaaattcagcagaatatgatgaggacaaggaaattgatgcagaaataaaaattgaagaaatcgcagatcgttcaattgttaagactaacaaaatcagagctcggaggcgtggcgctaggcatcaagagaatagcgcaagggctaagtcaatcagtaatgcgaacccggcctcgatacaaaaacatgaagatgaaatcgttagtgcagataatgacgattgggatattgattatgtctgagaaatcgtcaaatgagtgaaacgcgtgaggctcgtatatcaagagctaaaagggcatttgtatccacaccgagcgttaggaaaatcttgagttacatggatagatgtagagatctatcagacctagagtctgagcctacatgcatgatggtctatggtgcttcgggtgtaggtaaaacgaccgtcatcaagaaatacttaaatcaaaacagaagagagtccgaagccgggggcgatataataccggttttgcatattgagttgccagacaatgcgaagccagtagatgcagcaagggaattgctggttgaaatgggtgacccgctagcactttatgaaactgacttagctagattgacgaaaagactgactgaattaatccctgcggtcggcgtgaagctgattattatcgatgagttccaacatttggtggaagaaaggtcaaatcgggttcttacccaagtaggtaattggctaaaaatgatacttaacaaaacgaaatgtccaattgttatatttggtatgccatactcaaaagttgtactgcaagcaaactcgcaacttcacgggcgattttccattcaggttgaactgcgcccctttagctaccagggaggtagaggtgtatttaaaacttttttggaataccttgataaagccctaccttttgaaaaacaggctggcttagccaacgaaagtttgcagaaaaaattgtatgcattctctcagggaaacatgcgttcgttgagaaaccttatttatcaagcatctatcgaagcaattgataatcagcatgagacgataaccgaagaagatttcgtttttgcatcgaagttgacatcgggcgataaacccaactcatggaaaaatccttttgaggagggtgttgaggtaacagaagatatgttacgaccgccaccaaaagatattggttgggaggactatttgagacattcaaccccgagagtgagtaaaccaggtagaaataaaaactttttcgaataacctaggctgctgcgctgctgccaccgctgagcaataactagcataaccccttggggcctctaaacgggtcttgaggggttttttgctgaaacctcaggcatttgttgttgatacaaccataaaatgataattacacccataaattgataattatcacacccataaattgatattgcctcttcatggtctaaacttcagtaagtttacgacattttcctcgaggtcatttccggggatccatggagaaaaaaatcactggatataccaccgttgatatatcccaatggcatcgtaaagaacattttgaggcatttcagtcagttgctcaatgtacctataaccagaccgttcagctggatattacggcctttttaaagaccgtaaagaaaaataagcacaagttttatccggcctttattcacattcttgcccgcctgatgaatgctcatccggagttccgtatggcaatgaaagacggtgagctggtgatatgggatagtgttcacccttgttacaccgttttccatgagcaaactgaaacgttttcatcgctctggagtgaataccacgacgatttccggcagtttctacacatatattcgcaagatgtggcgtgttacggtgaaaacctggcctatttccctaaagggtttattgagaatatgtttttcgtctcagccaatccctgggtgagtttcaccagttttgatttaaacgtggccaatatggacaacttcttcgcccccgttttcactatgggcaaatattatacgcaaggcgacaaggtgctgatgccgctggcgattcaggttcatcatgccgtttgtgatggcttccatgtcggcagaatgcttaatgaattacaacagtactgcgatgagtggcagggcggggcgtaatttttttaaggcagttattggtgcccttctagagtccttactgcagtagttttgctgaaatactcgattcacaaaaatatcaacttatggttgttttgtgagatatcaatatatggttgttttgtggttaagttgctgattataaataattattaaatatcactttatggttgcatcaacaggtaccgagctcgaattcactggccgtcgttttacaacgtcgtgactgggaaaaccctggcgttacccaacttaatcgccttgccattttttaaccaataggccgtactgcgatgagtggcagggcggggcgtaatttttttaaggcagttattggtgcccttaaacgcctggttgctacgcctgaataagtgataataagcggatgaatggcagaaattcgaaagcaaattcgacccggtcgtcggttcagggcagggtcgttaaatagccgcttatgtctattgctggtttaccggtttattgactaccggaagcagtgtgaccgtgtgcttctcaaatgcctgaggccagtttgctcaggctctccccgtggaggtaataattgacgatatgatcatttattctgcctcccagagcctgataaaaacggtgaatccgttagcgaggtgccgccggcttccattcaggtcgaggtggcccggctccatgcaccgcgacgcaacgcggggaggcagacaaggtatagggcggcgaggcggctacagccgatagtctggaacagcgcacttacgggttgctgcgcaacccaagtgctaccggcgcggcagcgtgacccgtgtcggcggctccaacggctcgccatcgtccagaaaacacggctcatcgggcatcggcaggcgctgctgcccgcgccgttcccattcctccgtttcggtcaaggctggcaggtctggttccatgcccggaatgccgggctggctgggcggctcctcgccggggccggtcggtagttgctgctcgcccggatacagggtcgggatgcggcgcaggtcgccatgccccaacagcgattcgtcctggtcgtcgtgatcaaccaccacggcggcactgaacaccgacaggcgcaactggtcgcggggctggccccacgccacgcggtcattgaccacgtaggccgacacggtgccggggccgttgagcttcacgacggagatccagcgctcggccaccaagtccttgactgcgtattggaccgtccgcaaagaacgtccgatgagcttggaaagtgtcttctggctgaccaccacggcgttctggtggcccatctgcgccacgaggtgatgcagcagcattgccgccgtgggtttcctcgcaataagcccggcccacgcctcatgcgctttgcgttccgtttgcacccagtgaccgggcttgttcttggcttgaatgccgatttctctggactgcgtggccatgcttatctccatgcggtaggggtgccgcacggttgcggcaccatgcgcaatcagctgcaacttttcggcagcgcgacaacaattatgcgttgcgtaaaagtggcagtcaattacagattttctttaacctacgcaatgagctattgcggggggtgccgcaatgagctgttgcgtaccccccttttttaagttgttgatttttaagtctttcgcatttcgccctatatctagttctttggtgcccaaagaagggcacccctgcggggttcccccacgccttcggcgcggctccccctccggcaaaaagtggcccctccggggcttgttgatcgactgcgcggccttcggccttgcccaaggtggcgctgcccccttggaacccccgcactcgccgccgtgaggctcggggggcaggcgggcgggcttcgcccttcgactgcccccactcgcataggcttgggtcgttccaggcgcgtcaaggccaagccgctgcgcggtcgctgcgcgagccttgacccgccttccacttggtgtccaaccggcaagcgaagcgcgcaggccgcaggccggaggcttttccccagagaaaattaaaaaaattgatggggcaaggccgcaggccgcgcagttggagccggtgggtatgtggtcgaaggctgggtagccggtgggcaatccctgtggtcaagctcgtgggcaggcgcagcctgtccatcagcttgtccagcagggttgtccacgggccgagcgaagcgagccagccggtggccgctcgcggccatcgtccacatatccacgggctggcaagggagcgcagcgaccgcgcagggcgaagcccggagagcaagcccgtagggcgccgcagccgccgtaggcggtcacgactttgcgaagcaaagtctagtgagtatactcaagcattgagtggcccgccggaggcaccgccttgcgctgcccccgtcgagccggttggacaccaaaagggaggggcaggcatggcggcatacgcgatcatgcgatgcaagaagctggcgaaaatgggcaacgtggcggccagtctcaagcacgcctaccgcgagcgcgagacgcccaacgctgacgccagcaggacgccagagaacgagcactgggcggccagcagcaccgatgaagcgatgggccgactgcgcgagttgctgccagagaagcggcgcaaggacgctgtgttggcggtcgagtacgtcatgacggccagcccggaatggtggaagtcggccagccaagaacagcaggcggcgttcttcgagaaggcgcacaagtggctggcggacaagtacggggcggatcgcatcgtgacggccagcatccaccgtgacgaaaccagcccgcacatgaccgcgttcgtggtgccgctgacgcaggacggcaggctgtcggccaaggagttcatcggcaacaaagcgcagatgacccgcgaccagaccacgtttgcggccgctgtggccgatctagggctgcaacggggcatcgagggcagcaaggcacgtcacacgcgcattcaggcgttctacgaggccctggagcggccaccagtgggccacgtcaccatcagcccgcaagcggtcgagccacgcgcctatgcaccgcagggattggccgaaaagctgggaatctcaaagcgcgttgagacgccggaagccgtggccgaccggctgacaaaagcggttcggcaggggtatgagcctgccctacaggccgccgcaggagcgcgtgagatgcgcaagaaggccgatcaagcccaagagacggcccgagaccttcgggagcgcctgaagcccgttctggacgccctggggccgttgaatcgggatatgcaggccaaggccgccgcgatcatcaaggccgtgggcgaaaagctgctgacggaacagcgggaagtccagcgccagaaacaggcccagcgccagcaggaacgcgggcgcgcacatttccccgaaaagtgccacctgggatgaatgtcagctactgggctatctggacaagggaaaacgcaagcgcaaagagaaagcaggtagcttgcagtgggcttacatggcgatagctagactgggcggttttatggacagcaagcgaaccggaattgccagctggggcgccctctggtaaggttgggaagccctgcaaagtaaactggatggctttcttgccgccaaggatctgatggcgcaggggatcaagatctgatcaagagacaggatgaggatcgtttcgcatgattgaacaagatggattgcacgcaggttctccggccgcttgggtggagaggctattcggctatgactggg

SEQ ID NO: 21 - DNA, 12747 bp, artificial sequence
  Synthetic
tttctgccagagttgtgcaacaacgagtcactggctgcaaagtgtctccgcgttctgcatggatttaactatcagtatgagacacgaaatatcggcgtttcatttccgctttggtgtgatgcaacggttggaaaaaagatttcatttgtcagcaagaacaagatagaactcgacttactacttaaacaacactatttcgtccaaatggaacaacttcaatactttcatatatccaacactgttctcgtcccagaagattgtacatacgtttcctttagacgctgtcaatctatagataagctcacagcagcagggctggcaaggaaaatcagacgcctggagaaacgtgctctatctagaggcgagcaatttgacccatcatcttttgctcaaaaagagcatactgcaatagcgcactaccactcacttggggagtccagcaaacagacgaaccgcaactttcgactcaatatcaggatgctctcggagcaaccccgtgaggggaactcgatttttagtagctatggcttatcaaattcagaaaactcgtttcagcctgtacccttaatctgacctttaataaggagatataccatggcgacaagtttacctacgccctcagcaattacgacttcggcgttagagtatgcattccatactcccgctcgcaatctaacgaaatctcgcggaaaaaacattcatcgttatgtcagtgtaaagatgagtaagaggattacggtagaatctactctagagtgtgatgcctgctatcactttgattttgagccaagtattgttcgcttttgcgctcaaccgattcgatttttatattatctcaatggtcagtctcactcctatgttcctgactttctagttcaatttgataccaacgagtttgttctatatgaagtaaagtcagcttatgctaagaacaaacctgattttgatgttgaatgggaggcgaaagtaaaagcagcaactgaactagggctagaattggagcttgttgaagagagtgatattagggatacggttgtattaaataatcttaagcgcatgcatcgttatgcttcgaaagatgagctgaataacgtacataactctctcttaaaaataataaagtacaatggcgcccaatctgcaagatgcttgggagaacagttgggtttaaaaggccgaactgttttaccaattttgtgcgatttgctgtcaaggtgtttactcgatacacgtttggataagcctctatctcttgaatctcgatttgagttggccagttatggctaagaaagggttctcaagtttccatagaaaagcagtctcttcccaagatacgcttgaatcgatagagcttgtctctagcgctaattgtctagaaagtgttacgtatcaagatatatcagcatttcccgaaacaattgcggtagagattaatttccgattaagcattcttcgctttttagcgcgaaagtgcgaaaccattgtggccaaatcaattgaaccacatcgtgtagagctacagcaaaactatagtagaaaaatacccagtgcaataacgatatatcgatggtggcttgcttttcgaaaatcagactacaaccccattagcttagcacctaatatcaaggatagaggtaatagagagacaaaagtgtcaacagttgttgattctattatggaacaggcagttgaaagagttatatctggacgaaaagtcaatgttagctctgcatataaacgtgttcgacgaaaagttcgtcaatacaatctaactcatggaacgaaatacacgtatcctaagtacgaatctgtaagaaagcgagtaaaaaagaaaaccccatttgagttattagccgcagggaaaggggagagagtagctaagagagagtttcgccgaatgggaaaaaagatcctcacgtctagcgtgctagagagggttgaaatagatcacactgtcgttgacctttttgcagtacacgaagagtatcgaatcccattgggccgaccttggcttactcaattggttgattgttacagtaaagctgtaatcggtttttatttaggtttcgagcctcctagctatgtgtcggtttcccttgcacttaagaatgcaatacaacgcaaagatgacttaatctcctcgtatgaatcgatcgagaatgaatggctatgttatggcatcccagacctactcgtaactgataatggtaaagagtttttgtcgaaagcatttgatcaagcatgtgaatcactattgatcaatgtgcatcaaaataaagttgagacgcccgacaacaaacctcatgttgaacgtaactacgggactattaatacttctctgttagacgatttacctgggaaatccttcagccagtaccttcaaagagaagggtacgactctgtgggagaagctacccttacactcaatgagattagagaaatttacttaatttggttggtggatatttatcataaaaaacccaatcagagaggcactaattgtcctaatgttgcgtggaaaaagggttgtcaagaatgggaaccagaggagttctctggttctaaagacgaattagactttaaatttgctattgttgattacaaacaacttactaaagtagggataactgtctacaaagaactgagttatagcaatgaccgtttagctgaatatagagggaagaaaggaaaccataaagttcagttcaagtataaccctgagtgtatggcagttatttgggtgttggatgaggatatgaatgagtactttacagttaatgcgattgactacgaatatgcaagtagagtatcactttggcaacataaatataacatgaaatatcaagcagaactaaattcagcagaatatgatgaggacaaggaaattgatgcagaaataaaaattgaagaaatcgcagatcgttcaattgttaagactaacaaaatcagagctcggaggcgtggcgctaggcatcaagagaatagcgcaagggctaagtcaatcagtaatgcgaacccggcctcgatacaaaaacatgaagatgaaatcgttagtgcagataatgacgattgggatattgattatgtctgagaaatcgtcaaatgagtgaaacgcgtgaggctcgtatatcaagagctaaaagggcatttgtatccacaccgagcgttaggaaaatcttgagttacatggatagatgtagagatctatcagacctagagtctgagcctacatgcatgatggtctatggtgcttcgggtgtaggtaaaacgaccgtcatcaagaaatacttaaatcaaaacagaagagagtccgaagccgggggcgatataataccggttttgcatattgagttgccagacaatgcgaagccagtagatgcagcaagggaattgctggttgaaatgggtgacccgctagcactttatgaaactgacttagctagattgacgaaaagactgactgaattaatccctgcggtcggcgtgaagctgattattatcgatgagttccaacatttggtggaagaaaggtcaaatcgggttcttacccaagtaggtaattggctaaaaatgatacttaacaaaacgaaatgtccaattgttatatttggtatgccatactcaaaagttgtactgcaagcaaactcgcaacttcacgggcgattttccattcaggttgaactgcgcccctttagctaccagggaggtagaggtgtatttaaaacttttttggaataccttgataaagccctaccttttgaaaaacaggctggcttagccaacgaaagtttgcagaaaaaattgtatgcattctctcagggaaacatgcgttcgttgagaaaccttatttatcaagcatctatcgaagcaattgataatcagcatgagacgataaccgaagaagatttcgtttttgcatcgaagttgacatcgggcgataaacccaactcatggaaaaatccttttgaggagggtgttgaggtaacagaagatatgttacgaccgccaccaaaagatattggttgggaggactatttgagacattcaaccccgagagtgagtaaaccaggtagaaataaaaactttttcgaataacctaggctgctgcgctgctgccaccgctgagcaataactagcataaccccttggggcctctaaacgggtcttgaggggttttttgctgaaacctcaggcatttgttgttgatacaaccataaaatgataattacacccataaattgataattatcacacccataaattgatattgcctcttcatggtctaaacttcagtaagtttacgacattttcctcgaggtcatttccggggatccatggagaaaaaaatcactggatataccaccgttgatatatcccaatggcatcgtaaagaacattttgaggcatttcagtcagttgctcaatgtacctataaccagaccgttcagctggatattacggcctttttaaagaccgtaaagaaaaataagcacaagttttatccggcctttattcacattcttgcccgcctgatgaatgctcatccggagttccgtatggcaatgaaagacggtgagctggtgatatgggatagtgttcacccttgttacaccgttttccatgagcaaactgaaacgttttcatcgctctggagtgaataccacgacgatttccggcagtttctacacatatattcgcaagatgtggcgtgttacggtgaaaacctggcctatttccctaaagggtttattgagaatatgtttttcgtctcagccaatccctgggtgagtttcaccagttttgatttaaacgtggccaatatggacaacttcttcgcccccgttttcactatgggcaaatattatacgcaaggcgacaaggtgctgatgccgctggcgattcaggttcatcatgccgtttgtgatggcttccatgtcggcagaatgcttaatgaattacaacagtactgcgatgagtggcagggcggggcgtaatttttttaaggcagttattggtgcccttctagagtccttactgcagtagttttgctgaaatactcgattcacaaaaatatcaacttatggttgttttgtgagatatcaatatatggttgttttgtggttaagttgctgattataaataattattaaatatcactttatggttgcatcaacaggtaccgagctcgaattcactggccgtcgttttacaacgtcgtgactgggaaaaccctggcgttacccaacttaatcgccttgccagttcaccgacaaacgaaagctgataatctcatgaccaaaatcccttaacgtgagttttcgttccactgagcgtcagaccccgttgatgataccgctgccttactgggtgcattagccagtctgaatgacctgtcacgggataatccgaagtggtcagactggaaaatcagagggcaggaactgctgaacagcaaaaagtcagatagcaccacatagcagacccgccataaaacgccctgagaagcccgtgacgggcttttcttgtattatgggtagtttccttgcatgaatccataaaaggcgcctgtagtgccatttacccccattcactgccagagccgtgagcgcagcgaactgaatgtcacgaaaaagacagcgactcaggtgcctgatggtcggagacaaaaggaatattcagcgatttgcccgattgcggccgcaaccgagcttgcgagggtgctacttaagcctttagggttttaaggtctgttttgtagaggagcaaacagcgtttgcgacatccttttgtaatactgcggaactgactaaagtagtgagttatacacagggctgggatctattctttttatctttttttattctttctttattctataaattataaccacttgaatataaacaaaaaaaacacacaaaggtctagcggaatttacagagggtctagcagaatttacaagttttccagcaaaggtctagcagaatttacagatacccacaactcaaaggaaaaggactagtaattatcattgactagcccatctcaattggtatagtgattaaaatcacctagaccaattgagatgtatgtctgaattagttgttttcaaagcaaatgaactagcgattagtcgctatgacttaacggagcatgaaaccaagctaattttatgctgtgtggcactactcaaccccacgattgaaaaccctacaaggaaagaacggacggtatcgttcacttataaccaatacgttcagatgatgaacatcagtagggaaaatgcttatggtgtattagctaaagcaaccagagagctgatgacgagaactgtggaaatcaggaatcctttggttaaaggctttgagattttccagtggacaaactatgccaagttctcaagcgaaaaattagaattagtttttagtgaagagatattgccttatcttttccagttaaaaaaattcataaaatataatctggaacatgttaagtcttttgaaaacaaatactctatgaggatttatgagtggttattaaaagaactaacacaaaagaaaactcacaaggcaaatatagagattagccttgatgaatttaagttcatgttaatgcttgaaaataactaccatgagtttaaaaggcttaaccaatgggttttgaaaccaataagtaaagatttaaacacttacagcaatatgaaattggtggttgataagcgaggccgcccgactgatacgttgattttccaagttgaactagatagacaaatggatctcgtaaccgaacttgagaacaaccagataaaaatgaatggtgacaaaataccaacaaccattacatcagattcctacctacataacggactaagaaaaacactacacgatgctttaactgcaaaaattcagctcaccagttttgaggcaaaatttttgagtgacatgcaaagtaagtatgatctcaatggttcgttctcatggctcacgcaaaaacaacgaaccacactagagaacatactggctaaatacggaaggatctgaggttcttatggctcttgtatctatcagtgaagcatcaagactaacaaacaaaagtagaacaactgttcaccgttacatatcaaagggaaaactgtccatacccatggattcttcgtctgtttctactggtattggcacaaacctgatatcgatgcaggtggcacttttcggggaaatgtgcgcggaacccctatttgtttatttttctaaatacattcaaatatgtatccgctcatgagacaataaccctggtagcgaccgagtgagctagctatttgtttatttttctaaatacattcaaatatgtatccgctcatgagacaataaccctgataaatgcttcaataatattgaaaaaggaagagtatgagggaagcggtgatcgccgaagtatcgactcaactatcagaggtagttggcgtcatcgagcgccatctcgaaccgacgttgctggccgtacatttgtacggctccgcagtggatggcggcctgaagccacacagtgatattgatttgctggttacggtgaccgtaaggcttgatgaaacaacgcggcgagctttgatcaacgaccttttggaaacttcggcttcccctggagagagcgagattctccgcgctgtagaagtcaccattgttgtgcacgacgacatcattccgtggcgttatccagctaagcgcgaactgcaatttggagaatggcagcgcaatgacattcttgcaggtatcttcgagccagccacgatcgacattgatctggctatcttgctgacaaaagcaagagaacatagcgttgccttggtaggtccagcggcggaggaactctttgatccggttcctgaacaggatctatttgaggcgctaaatgaaaccttaacgctatggaactcgccgcccgactgggctggcgatgagcgaaatgtagtgcttacgttgtcccgcatttggtacagcgcagtaaccggcaaaatcgcgccgaaggatgtcgctgccgactgggcaatggagcgcctgccggcccagtatcagcccgtcatacttgaagctagacaggcttatcttggacaagaagaagatcgcttggcctcgcgcgcagatcagttggaagaatttgtccactacgtgaaaggcgagatcaccaaggtagtcggcaaataatgtcctgtcagaccaagtttactcatatatactttagattgatttaaaacttcatttttaatttaaaaggatctaggtgaagatccgcctgcatggataaccgtattaccgcctttgagtgagctgataccgctcgccgcagccgaactaccgagcgcagcgagtcagtgagcgaggagcgactcctgcattaggaaattaatacgactcactataggggaattgtgagcggataacaattccctcgacgtggagatataccatgggtgaactgccgagtaggtagctgataacagtacagcgcggctgaaatcatcattaaagcggtgaactgccgagtaggtagctgataacggatccgaattcgagcgaaggagatatacatatgtttttgcaaagacctaaaccttacagcgatgaaagtttagaaagtttctttatccgagtggctaacaaaaatggctacggtgatgtccatcgcttcctagaagccactaaacgattccttcaagacattgaccataatggctatcaaacctttccgactgatataactcggataaacccatactcagctaaaaacagttccagcgcacgaactgcgtcattcctgaaacttgcacaattgacatttaatgaaccgccagagctacttgggttggcaattaacagaacaaacatgaaatactcgccgtcaactagcgcggttgttagaggtgcagaagtctttcctcgcagtttactacggacgcactccatcccctgctgtcctttgtgtctgcgagaaaatggctacgcctcctacctttggcactttcaggggtacgaatactgccacagccataacgtacctttaattaccacttgtagctgtggtaaggagtttgactaccgagtatctgggttaaagggcatttgctgcaaatgcaaggagcctatcaccttaaccagcagggagaacggtcatgaggcagcgtgtactgtttcaaactggcttgctggccatgaatctaaacctctgccaaatcttcctaaaagctaccgatggggtttagttcattggtggatgggtattaaagatagcgagttcgatcacttttcgttcgttcaatttttctcaaactggccaaggtcattccactcgataatcgaagatgaagtagagttcaaccttgagcatgctgttgtcagcacgtctgaattacgactaaaagatcttcttggtcgattgtttttcggttcaattcggttacctgagcggaatcttcaacacaatatcatccttggtgagcttctctgctatttagaaaatcgtttatggcaagacaagggattaatcgccaacctcaaaatgaacgcgttagaggcgactgtaatgttaaattgtagcctcgatcagattgcatcaatggttgaacaacgcatcttgaagccaaatcgaaaaagcaagcccaacagccctcttgatgttaccgattatctatttcatttcggcgatattttctgtctttggttagctgagttccaaagcgatgagtttaaccgttcgttttatgtgtcgaggtggtaaatgcaaactctgaaagaactaatcgcatccaatcctgacgacttaacaactgaacttaagagagcatttcgtccactcacaccgcatattgcaattgatggtaatgaacttgacgcactgacgatattagtcaatttaaccgataagactgatgatcagaaagacctgctcgatcgagccaaatgcaagcaaaaacttcgagatgaaaaatggtgggctagctgcataaattgcgttaattacagacaaagccataacccaaaattcccggatatacgttctgaaggcgtgattcgaacccaagccctgggtgaattaccgagtttcctactctcgtcctcaaaaatcccaccataccattggtcatatagccatgattcaaaatacgtcaacaaaagcgcattcctcaccaatgagttttgttgggatggtgagatctcatgtttgggtgagcttcttaaagatgcagatcacccactttggaatactttgaaaaagttaggttgttctcaaaaaacttgcaaagcaatggcaaaacaactagctgatattactctcacgactatcaatgtcacactcgcaccaaattacctgactcaaatatctctccccgatagtgatacatcctacatttcactctctcctgttgcatcgctatcgatgcaaagccactttcatcagaggctccaagatgaaaatcggcatagcgcgataacgcggtttagccgaactaccaacatgggggtcactgcgatgacatgtggcggcgcatttagaatgttaaagtctggcgctaagttttccagcccccctcatcaccgattaaacagtaaacgaagttggttgacgtcagagcatgttcagtcattaaaacagtaccagcgcctcaacaaaagcctcatacctgaaaactctcggattgcactccgtagaaaatacaaaatcgagcttcaaaatatggtcagatcttggtttgcaatgcaagaccatacccttgattcgaacatacttatccaacatttgaatcatgacctatcttacttaggagccacaaaacgttttgcatacgatccagcgatgaccaagctctttactgagcttttgaaacgagagttatcaaattcaatcaataatggtgagcaacacactaatggatcgtttttagtcctaccgaatatcagggtttgtggcgcaacagctttaagctccccggtaacggtggggattccatcacttacagctttctttggcttcgttcacgcatttgaacggaatataaatcgcaccacctcatcgtttcgtgttgaatcctttgcgatatgcgtccatcaactacatgtcgagaagcgaggtttgacagcagagtttgtggaaaaaggcgacgggactatatccgctcccgcgacccgggatgactggcagtgtgatgtcgtatttagccttattttgaacaccaactttgctcaacatattgaccaagatacgttagttacatcactaccaaagcgattggctcggggttcagcaaaaattgcgattgatgactttaaacatatcaactcattctcgacattagaaacagcgatcgaatctctgccaatagaagctggtaggtggttatcactttacgcacagtcaaacaataatctaagtgatctattagcagccatgacagaggaccatcagctcatggcaagctgcgtcggttaccacttgttagaagagcccaaagataaaccaaactccctcagaggttacaaacacgctatcgccgagtgcatcattggactcattaactcaatcacctttagctcagagactgatcccaacacaatcttttggtcgctaaagaactatcaaaactacctagtggtacagccaaggagtatcaacgatgaaactaccgacaaatctagcctatgagcgctctatcgacccatcagatgtctgtttttttgtcgtctggcccgatgatagaaaaacacctttaacctacaattctcgtactctgctcgggcaaatggaagcggcatcattagcctatgatgtctcaggtcaaccaataaaaagtgccaccgctgaggcgttagctcaagggaaccctcatcaagttgatttctgccacgttccatacggtgcgagtcatattgaatgcagtttctccgtctcgttttcttctgaactacgtcaaccatataagtgtaactcaagcaaagttaaacaaacgctagtgcaattagtcgagctctacgaaacgaaaatcggctggactgagctagcaacccgatatttgatgaacatttgcaacggtaaatggctgtggaaaaatacccgtaaagcctattgctggaacattgtacttacaccttggccttggaacggggaaaaggttggatttgaagatattcgtactaactacacctcacggcaagactttaaaaataataaaaattggtctgctatagttgaaatgatcaaaaccgcattttctagtactgatgggctggcgatatttgaagtcagggccaccttgcacttgccaacgaatgctatggtgcggccaagccaagttttcacagaaaaagaaagtggcagtaaaagtaaatctaaaactcaaaacagtcgagtttttcagagtacaactattgatggtgaacgatcgccaatactaggggcctttaaaacgggagcagctattgcaaccattgacgactggtatcctgaagccactgagccactaagggtcggacggtttggggttcatcgcgaagatgtcacttgctaccgtcatccgtctaccggaaaagattttttctcgatattacaacaagcagagcactatattgaagtgttgagcgccaacaaaactcccgctcaagaaactatcaacgacatgcactttttaatggctaacctgattaagggtgggatgttccagcataaaggagactgactgtgaaatggtattataagacaatcacc

SEQ ID NO: 22 - DNA, 14077 bp, artificial sequence
  Synthetic
ccgccgtgggtttcctcgcaataagcccggcccacgcctcatgcgctttgcgttccgtttgcacccagtgaccgggcttgttcttggcttgaatgccgatttctctggactgcgtggccatgcttatctccatgcggtaggggtgccgcacggttgcggcaccatgcgcaatcagctgcaacttttcggcagcgcgacaacaattatgcgttgcgtaaaagtggcagtcaattacagattttctttaacctacgcaatgagctattgcggggggtgccgcaatgagctgttgcgtaccccccttttttaagttgttgatttttaagtctttcgcatttcgccctatatctagttctttggtgcccaaagaagggcacccctgcggggttcccccacgccttcggcgcggctccccctccggcaaaaagtggcccctccggggcttgttgatcgactgcgcggccttcggccttgcccaaggtggcgctgcccccttggaacccccgcactcgccgccgtgaggctcggggggcaggcgggcgggcttcgcccttcgactgcccccactcgcataggcttgggtcgttccaggcgcgtcaaggccaagccgctgcgcggtcgctgcgcgagccttgacccgccttccacttggtgtccaaccggcaagcgaagcgcgcaggccgcaggccggaggcttttccccagagaaaattaaaaaaattgatggggcaaggccgcaggccgcgcagttggagccggtgggtatgtggtcgaaggctgggtagccggtgggcaatccctgtggtcaagctcgtgggcaggcgcagcctgtccatcagcttgtccagcagggttgtccacgggccgagcgaagcgagccagccggtggccgctcgcggccatcgtccacatatccacgggctggcaagggagcgcagcgaccgcgcagggcgaagcccggagagcaagcccgtagggcgccgcagccgccgtaggcggtcacgactttgcgaagcaaagtctagtgagtatactcaagcattgagtggcccgccggaggcaccgccttgcgctgcccccgtcgagccggttggacaccaaaagggaggggcaggcatggcggcatacgcgatcatgcgatgcaagaagctggcgaaaatgggcaacgtggcggccagtctcaagcacgcctaccgcgagcgcgagacgcccaacgctgacgccagcaggacgccagagaacgagcactgggcggccagcagcaccgatgaagcgatgggccgactgcgcgagttgctgccagagaagcggcgcaaggacgctgtgttggcggtcgagtacgtcatgacggccagcccggaatggtggaagtcggccagccaagaacagcaggcggcgttcttcgagaaggcgcacaagtggctggcggacaagtacggggcggatcgcatcgtgacggccagcatccaccgtgacgaaaccagcccgcacatgaccgcgttcgtggtgccgctgacgcaggacggcaggctgtcggccaaggagttcatcggcaacaaagcgcagatgacccgcgaccagaccacgtttgcggccgctgtggccgatctagggctgcaacggggcatcgagggcagcaaggcacgtcacacgcgcattcaggcgttctacgaggccctggagcggccaccagtgggccacgtcaccatcagcccgcaagcggtcgagccacgcgcctatgcaccgcagggattggccgaaaagctgggaatctcaaagcgcgttgagacgccggaagccgtggccgaccggctgacaaaagcggttcggcaggggtatgagcctgccctacaggccgccgcaggagcgcgtgagatgcgcaagaaggccgatcaagcccaagagacggcccgtgaccttcgggagcgcctgaagcccgttctggacgccctggggccgttgaatcgggatatgcaggccaaggccgccgcgatcatcaaggccgtgggcgaaaagctgctgacggaacagcgggaagtccagcgccagaaacaggcccagcgccagcaggaacgcgggcgcgcacatttccccgaaaagtgccacctgggatgaatgtcagctactgggctatctggacaagggaaaacgcaagcgcaaagagaaagcaggtagcttgcagtgggcttacatggcgatagctagactgggcggttttatggacagcaagcgaaccggaattgccagctggggcgccctctggtaaggttgggaagccctgcaaagtaaactggatggctttcttgccgccaaggatctgatggcgcaggggatcaagatctgatcaagagacaggatgaggatcgtttcgcatgattgaacaagatggattgcacgcaggttctccggccgcttgggtggagaggctattcggctatgactgggcacaacagacaatcggctgctctgatgccgccgtgttccggctgtcagcgcaggggcgcccggttctttttgtcaagaccgacctgtccggtgccctgaatgaactgcaagacgaggcagcgcggctatcgtggctggccacgacgggcgttccttgcgcagctgtgctcgacgttgtcactgaagcgggaagggactggctgctattgggcgaagtgccggggcaggatctcctgtcatctcaccttgctcctgccgagaaagtatccatcatggctgatgcaatgcggcggctgcatacgcttgatccggctacctgcccattcgaccaccaagcgaaacatcgcatcgagcgagcacgtactcggatggaagccggtcttgtcgatcaggatgatctggacgaagagcatcaggggctcgcgccagccgaactgttcgccaggctcaaggcgcgcatgcccgacggcgaggatctcgtcgtgacccatggcgatgcctgcttgccgaatatcatggtggaaaatggccgcttttctggattcatcgactgtggccggctgggtgtggcggaccgctatcaggacatagcgttggctacccgtgatattgctgaagagcttggcggcgaatgggctgaccgcttcctcgtgctttacggtatcgccgctcccgattcgcagcgcatcgccttctatcgccttcttgacgagttcttctgagcgggactctggggttcgaaatgaccgaccaagcgacgcccaacctgccatcacgagatttcgattccaccgccgccttctatgaaaggttgggcttcggaatcgttttccgggacgccggctggatgatcctccagcgcggggatctcatgctggagttcttcgcccacccccatgggcaaatattatacgcaaggcgacaaggtgctgatgccgctggcgattcaggttcatcatgccgtttgtgatggcttccatgtcggcagaatgcttaatgaattacaacagtttttatgcatgcgcccaatacgcaaaccgcctctccccgcgcgttggccgattcattaatgcagctggcacgacaggtttcccgactggtggataaccgtattaccgcctttgagtgagctgataccgctcgccgcagccgaactaccgagcgcagcgagtcagtgagcgaggagcgactcctgcattaggaaattaatacgactcactataggggaattgtgagcggataacaattcccctgtagaaataattttgtttaactttaataaggagatataccatgggtgaactgccgagtaggtagctgataacgagacctctgtcttgtcagctagggtggtctcgtgaactgccgagtaggtagctgataacggatccgaattcgagcgaaggagatatacatatgtttttgcaaagacctaaaccttacagcgatgaaagtttagaaagtttctttatccgagtggctaacaaaaatggctacggtgatgtccatcgcttcctagaagccactaaacgattccttcaagacattgaccataatggctatcaaacctttccgactgatataactcggataaacccatactcagctaaaaacagttccagcgcacgaactgcgtcattcctgaaacttgcacaattgacatttaatgaaccgccagagctacttgggttggcaattaacagaacaaacatgaaatactcgccgtcaactagcgcggttgttagaggtgcagaagtctttcctcgcagtttactacggacgcactccatcccctgctgtcctttgtgtctgcgagaaaatggctacgcctcctacctttggcactttcaggggtacgaatactgccacagccataacgtacctttaattaccacttgtagctgtggtaaggagtttgactaccgagtatctgggttaaagggcatttgctgcaaatgcaaggagcctatcaccttaaccagcagggagaacggtcatgaggcagcgtgtactgtttcaaactggcttgctggccatgaatctaaacctctgccaaatcttcctaaaagctaccgatggggtttagttcattggtggatgggtattaaagatagcgagttcgatcacttttcgttcgttcaatttttctcaaactggccaaggtcattccactcgataatcgaagatgaagtagagttcaaccttgagcatgctgttgtcagcacgtctgaattacgactaaaagatcttcttggtcgattgtttttcggttcaattcggttacctgagcggaatcttcaacacaatatcatccttggtgagcttctctgctatttagaaaatcgtttatggcaagacaagggattaatcgccaacctcaaaatgaacgcgttagaggcgactgtaatgttaaattgtagcctcgatcagattgcatcaatggttgaacaacgcatcttgaagccaaatcgaaaaagcaagcccaacagccctcttgatgttaccgattatctatttcatttcggcgatattttctgtctttggttagctgagttccaaagcgatgagtttaaccgttcgttttatgtgtcgaggtggtaaatgcaaactctgaaagaactaatcgcatccaatcctgacgacttaacaactgaacttaagagagcatttcgtccactcacaccgcatattgcaattgatggtaatgaacttgacgcactgacgatattagtcaatttaaccgataagactgatgatcagaaagacctgctcgatcgagccaaatgcaagcaaaaacttcgagatgaaaaatggtgggctagctgcataaattgcgttaattacagacaaagccataacccaaaattcccggatatacgttctgaaggcgtgattcgaacccaagccctgggtgaattaccgagtttcctactctcgtcctcaaaaatcccaccataccattggtcatatagccatgattcaaaatacgtcaacaaaagcgcattcctcaccaatgagttttgttgggatggtgagatctcatgtttgggtgagcttcttaaagatgcagatcacccactttggaatactttgaaaaagttaggttgttctcaaaaaacttgcaaagcaatggcaaaacaactagctgatattactctcacgactatcaatgtcacactcgcaccaaattacctgactcaaatatctctccccgatagtgatacatcctacatttcactctctcctgttgcatcgctatcgatgcaaagccactttcatcagaggctccaagatgaaaatcggcatagcgcgataacgcggtttagccgaactaccaacatgggggtcactgcgatgacatgtggcggcgcatttagaatgttaaagtctggcgctaagttttccagcccccctcatcaccgattaaacagtaaacgaagttggttgacgtcagagcatgttcagtcattaaaacagtaccagcgcctcaacaaaagcctcatacctgaaaactctcggattgcactccgtagaaaatacaaaatcgagcttcaaaatatggtcagatcttggtttgcaatgcaagaccatacccttgattcgaacatacttatccaacatttgaatcatgacctatcttacttaggagccacaaaacgttttgcatacgatccagcgatgaccaagctctttactgagcttttgaaacgagagttatcaaattcaatcaataatggtgagcaacacactaatggatcgtttttagtcctaccgaatatcagggtttgtggcgcaacagctttaagctccccggtaacggtggggattccatcacttacagctttctttggcttcgttcacgcatttgaacggaatataaatcgcaccacctcatcgtttcgtgttgaatcctttgcgatatgcgtccatcaactacatgtcgagaagcgaggtttgacagcagagtttgtggaaaaaggcgacgggactatatccgctcccgcgacccgggatgactggcagtgtgatgtcgtatttagccttattttgaacaccaactttgctcaacatattgaccaagatacgttagttacatcactaccaaagcgattggctcggggttcagcaaaaattgcgattgatgactttaaacatatcaactcattctcgacattagaaacagcgatcgaatctctgccaatagaagctggtaggtggttatcactttacgcacagtcaaacaataatctaagtgatctattagcagccatgacagaggaccatcagctcatggcaagctgcgtcggttaccacttgttagaagagcccaaagataaaccaaactccctcagaggttacaaacacgctatcgccgagtgcatcattggactcattaactcaatcacctttagctcagagactgatcccaacacaatcttttggtcgctaaagaactatcaaaactacctagtggtacagccaaggagtatcaacgatgaaactaccgacaaatctagcctatgagcgctctatcgacccatcagatgtctgtttttttgtcgtctggcccgatgatagaaaaacacctttaacctacaattctcgtactctgctcgggcaaatggaagcggcatcattagcctatgatgtctcaggtcaaccaataaaaagtgccaccgctgaggcgttagctcaagggaaccctcatcaagttgatttctgccacgttccatacggtgcgagtcatattgaatgcagtttctccgtctcgttttcttctgaactacgtcaaccatataagtgtaactcaagcaaagttaaacaaacgctagtgcaattagtcgagctctacgaaacgaaaatcggctggactgagctagcaacccgatatttgatgaacatttgcaacggtaaatggctgtggaaaaatacccgtaaagcctattgctggaacattgtacttacaccttggccttggaacggggaaaaggttggatttgaagatattcgtactaactacacctcacggcaagactttaaaaataataaaaattggtctgctatagttgaaatgatcaaaaccgcattttctagtactgatgggctggcgatatttgaagtcagggccaccttgcacttgccaacgaatgctatggtgcggccaagccaagttttcacagaaaaagaaagtggcagtaaaagtaaatctaaaactcaaaacagtcgagtttttcagagtacaactattgatggtgaacgatcgccaatactaggggcctttaaaacgggagcagctattgcaaccattgacgactggtatcctgaagccactgagccactaagggtcggacggtttggggttcatcgcgaagatgtcacttgctaccgtcatccgtctaccggaaaagattttttctcgatattacaacaagcagagcactatattgaagtgttgagcgccaacaaaactcccgctcaagaaactatcaacgacatgcactttttaatggctaacctgattaagggtgggatgttccagcataaaggagactgactgtgaaatggtattataagacaatcacctttctgccagagttgtgcaacaacgagtcactggctgcaaagtgtctccgcgttctgcatggatttaactatcagtatgagacacgaaatatcggcgtttcatttccgctttggtgtgatgcaacggttggaaaaaagatttcatttgtcagcaagaacaagatagaactcgacttactacttaaacaacactatttcgtccaaatggaacaacttcaatactttcatatatccaacactgttctcgtcccagaagattgtacatacgtttcctttagacgctgtcaatctatagataagctcacagcagcagggctggcaaggaaaatcagacgcctggagaaacgtgctctatctagaggcgagcaatttgacccatcatcttttgctcaaaaagagcatactgcaatagcgcactaccactcacttggggagtccagcaaacagacgaaccgcaactttcgactcaatatcaggatgctctcggagcaaccccgtgaggggaactcgatttttagtagctatggcttatcaaattcagaaaactcgtttcagcctgtacccttaatctgacctttaataaggagatataccatggcgacaagtttacctacgccctcagcaattacgacttcggcgttagagtatgcattccatactcccgctcgcaatctaacgaaatctcgcggaaaaaacattcatcgttatgtcagtgtaaagatgagtaagaggattacggtagaatctactctagagtgtgatgcctgctatcactttgattttgagccaagtattgttcgcttttgcgctcaaccgattcgatttttatattatctcaatggtcagtctcactcctatgttcctgactttctagttcaatttgataccaacgagtttgttctatatgaagtaaagtcagcttatgctaagaacaaacctgattttgatgttgaatgggaggcgaaagtaaaagcagcaactgaactagggctagaattggagcttgttgaagagagtgatattagggatacggttgtattaaataatcttaagcgcatgcatcgttatgcttcgaaagatgagctgaataacgtacataactctctcttaaaaataataaagtacaatggcgcccaatctgcaagatgcttgggagaacagttgggtttaaaaggccgaactgttttaccaattttgtgcgatttgctgtcaaggtgtttactcgatacacgtttggataagcctctatctcttgaatctcgatttgagttggccagttatggctaagaaagggttctcaagtttccatagaaaagcagtctcttcccaagatacgcttgaatcgatagagcttgtctctagcgctaattgtctagaaagtgttacgtatcaagatatatcagcatttcccgaaacaattgcggtagagattaatttccgattaagcattcttcgctttttagcgcgaaagtgcgaaaccattgtggccaaatcaattgaaccacatcgtgtagagctacagcaaaactatagtagaaaaatacccagtgcaataacgatatatcgatggtggcttgcttttcgaaaatcagactacaaccccattagcttagcacctaatatcaaggatagaggtaatagagagacaaaagtgtcaacagttgttgattctattatggaacaggcagttgaaagagttatatctggacgaaaagtcaatgttagctctgcatataaacgtgttcgacgaaaagttcgtcaatacaatctaactcatggaacgaaatacacgtatcctaagtacgaatctgtaagaaagcgagtaaaaaagaaaaccccatttgagttattagccgcagggaaaggggagagagtagctaagagagagtttcgccgaatgggaaaaaagatcctcacgtctagcgtgctagagagggttgaaatagatcacactgtcgttgacctttttgcagtacacgaagagtatcgaatcccattgggccgaccttggcttactcaattggttgattgttacagtaaagctgtaatcggtttttatttaggtttcgagcctcctagctatgtgtcggtttcccttgcacttaagaatgcaatacaacgcaaagatgacttaatctcctcgtatgaatcgatcgagaatgaatggctatgttatggcatcccagacctactcgtaactgataatggtaaagagtttttgtcgaaagcatttgatcaagcatgtgaatcactattgatcaatgtgcatcaaaataaagttgagacgcccgacaacaaacctcatgttgaacgtaactacgggactattaatacttctctgttagacgatttacctgggaaatccttcagccagtaccttcaaagagaagggtacgactctgtgggagaagctacccttacactcaatgagattagagaaatttacttaatttggttggtggatatttatcataaaaaacccaatcagagaggcactaattgtcctaatgttgcgtggaaaaagggttgtcaagaatgggaaccagaggagttctctggttctaaagacgaattagactttaaatttgctattgttgattacaaacaacttactaaagtagggataactgtctacaaagaactgagttatagcaatgaccgtttagctgaatatagagggaagaaaggaaaccataaagttcagttcaagtataaccctgagtgtatggcagttatttgggtgttggatgaggatatgaatgagtactttacagttaatgcgattgactacgaatatgcaagtagagtatcactttggcaacataaatataacatgaaatatcaagcagaactaaattcagcagaatatgatgaggacaaggaaattgatgcagaaataaaaattgaagaaatcgcagatcgttcaattgttaagactaacaaaatcagagctcggaggcgtggcgctaggcatcaagagaatagcgcaagggctaagtcaatcagtaatgcgaacccggcctcgatacaaaaacatgaagatgaaatcgttagtgcagataatgacgattgggatattgattatgtctgagaaatcgtcaaatgagtgaaacgcgtgaggctcgtatatcaagagctaaaagggcatttgtatccacaccgagcgttaggaaaatcttgagttacatggatagatgtagagatctatcagacctagagtctgagcctacatgcatgatggtctatggtgcttcgggtgtaggtaaaacgaccgtcatcaagaaatacttaaatcaaaacagaagagagtccgaagccgggggcgatataataccggttttgcatattgagttgccagacaatgcgaagccagtagatgcagcaagggaattgctggttgaaatgggtgacccgctagcactttatgaaactgacttagctagattgacgaaaagactgactgaattaatccctgcggtcggcgtgaagctgattattatcgatgagttccaacatttggtggaagaaaggtcaaatcgggttcttacccaagtaggtaattggctaaaaatgatacttaacaaaacgaaatgtccaattgttatatttggtatgccatactcaaaagttgtactgcaagcaaactcgcaacttcacgggcgattttccattcaggttgaactgcgcccctttagctaccagggaggtagaggtgtatttaaaacttttttggaataccttgataaagccctaccttttgaaaaacaggctggcttagccaacgaaagtttgcagaaaaaattgtatgcattctctcagggaaacatgcgttcgttgagaaaccttatttatcaagcatctatcgaagcaattgataatcagcatgagacgataaccgaagaagatttcgtttttgcatcgaagttgacatcgggcgataaacccaactcatggaaaaatccttttgaggagggtgttgaggtaacagaagatatgttacgaccgccaccaaaagatattggttgggaggactatttgagacattcaaccccgagagtgagtaaaccaggtagaaataaaaactttttcgaataacctaggctgctgcgctgctgccaccgctgagcaataactagcataaccccttggggcctctaaacgggtcttgaggggttttttgctgaaacctcaggcatttgttgttgatacaaccataaaatgataattacacccataaattgataattatcacacccataaattgatattgcctcttcatggtctaaacttcagtaagtttacgacattttcctcgaggtcatttccggggatccatggagaaaaaaatcactggatataccaccgttgatatatcccaatggcatcgtaaagaacattttgaggcatttcagtcagttgctcaatgtacctataaccagaccgttcagctggatattacggcctttttaaagaccgtaaagaaaaataagcacaagttttatccggcctttattcacattcttgcccgcctgatgaatgctcatccggagttccgtatggcaatgaaagacggtgagctggtgatatgggatagtgttcacccttgttacaccgttttccatgagcaaactgaaacgttttcatcgctctggagtgaataccacgacgatttccggcagtttctacacatatattcgcaagatgtggcgtgttacggtgaaaacctggcctatttccctaaagggtttattgagaatatgtttttcgtctcagccaatccctgggtgagtttcaccagttttgatttaaacgtggccaatatggacaacttcttcgcccccgttttcactatgggcaaatattatacgcaaggcgacaaggtgctgatgccgctggcgattcaggttcatcatgccgtttgtgatggcttccatgtcggcagaatgcttaatgaattacaacagtactgcgatgagtggcagggcggggcgtaatttttttaaggcagttattggtgcccttctagagtccttactgcagtagttttgctgaaatactcgattcacaaaaatatcaacttatggttgttttgtgagatatcaatatatggttgttttgtggttaagttgctgattataaataattattaaatatcactttatggttgcatcaacaggtaccgagctcgaattcactggccgtcgttttacaacgtcgtgactgggaaaaccctggcgttacccaacttaatcgccttgcggccagtttgctcaggctctccccgtggaggtaataattgacgatatgatcatttattctgcctcccagagcctgataaaaacggtgaatccgttagcgaggtgccgccggcttccattcaggtcgaggtggcccggctccatgcaccgcgacgcaacgcggggaggcagacaaggtatagggcggcgaggcggctacagccgatagtctggaacagcgcacttacgggttgctgcgcaacccaagtgctaccggcgcggcagcgtgacccgtgtcggcggctccaacggctcgccatcgtccagaaaacacggctcatcgggcatcggcaggcgctgctgcccgcgccgttcccattcctccgtttcggtcaaggctggcaggtctggttccatgcccggaatgccgggctggctgggcggctcctcgccggggccggtcggtagttgctgctcgcccggatacagggtcgggatgcggcgcaggtcgccatgccccaacagcgattcgtcctggtcgtcgtgatcaaccaccacggcggcactgaacaccgacaggcgcaactggtcgcggggctggccccacgccacgcggtcattgaccacgtaggccgacacggtgccggggccgttgagcttcacgacggagatccagcgctcggccaccaagtccttgactgcgtattggaccgtccgcaaagaacgtccgatgagcttggaaagtgtcttctggctgaccaccacggcgttctggtggcccatctgcgccacgaggtgatgcagcagcattg

SEQ ID NO: 23 - DNA, 14340 bp, artificial sequence
  Synthetic
cacaacagacaatcggctgctctgatgccgccgtgttccggctgtcagcgcaggggcgcccggttctttttgtcaagaccgacctgtccggtgccctgaatgaactgcaagacgaggcagcgcggctatcgtggctggccacgacgggcgttccttgcgcagctgtgctcgacgttgtcactgaagcgggaagggactggctgctattgggcgaagtgccggggcaggatctcctgtcatctcaccttgctcctgccgagaaagtatccatcatggctgatgcaatgcggcggctgcatacgcttgatccggctacctgcccattcgaccaccaagcgaaacatcgcatcgagcgagcacgtactcggatggaagccggtcttgtcgatcaggatgatctggacgaagagcatcaggggctcgcgccagccgaactgttcgccaggctcaaggcgcgcatgcccgacggcgaggatctcgtcgtgacccatggcgatgcctgcttgccgaatatcatggtggaaaatggccgcttttctggattcatcgactgtggccggctgggtgtggcggaccgctatcaggacatagcgttggctacccgtgatattgctgaagagcttggcggcgaatgggctgaccgcttcctcgtgctttacggtatcgccgctcccgattcgcagcgcatcgccttctatcgccttcttgacgagttcttctgagcgggactctggggttcgaaatgaccgaccaagcgacgcccaacctgccatcacgagatttcgattccaccgccgccttctatgaaaggttgggcttcggaatcgttttccgggacgccggctggatgatcctccagcgcggggatctcatgctggagttcttcgcccacccccatgggcaaatattatacgcaaggcgacaaggtgctgatgccgctggcgattcaggttcatcatgccgtttgtgatggcttccatgtcggcagaatgcttaatgaattacaacagtttttatgcatgcgcccaatacgcaaaccgcctctccccgcgcgttggccgattcattaatgcagctggcacgacaggtttcccgactggtggataaccgtattaccgcctttgagtgagctgataccgctcgccgcagccgaactaccgagcgcagcgagtcagtgagcgaggagcgactcctgcattaggaaattaatacgactcactataggggaattgtgagcggataacaattcccctgtagaaataattttgtttaactttaataaggagatataccatgggtgaactgccgagtaggtagctgataactgggaggattcataaagcattgtttgttggctgtgaactgccgagtaggtagctgataacggatccgaattcgagcgaaggagatatacatatgtttttgcaaagacctaaaccttacagcgatgaaagtttagaaagtttctttatccgagtggctaacaaaaatggctacggtgatgtccatcgcttcctagaagccactaaacgattccttcaagacattgaccataatggctatcaaacctttccgactgatataactcggataaacccatactcagctaaaaacagttccagcgcacgaactgcgtcattcctgaaacttgcacaattgacatttaatgaaccgccagagctacttgggttggcaattaacagaacaaacatgaaatactcgccgtcaactagcgcggttgttagaggtgcagaagtctttcctcgcagtttactacggacgcactccatcccctgctgtcctttgtgtctgcgagaaaatggctacgcctcctacctttggcactttcaggggtacgaatactgccacagccataacgtacctttaattaccacttgtagctgtggtaaggagtttgactaccgagtatctgggttaaagggcatttgctgcaaatgcaaggagcctatcaccttaaccagcagggagaacggtcatgaggcagcgtgtactgtttcaaactggcttgctggccatgaatctaaacctctgccaaatcttcctaaaagctaccgatggggtttagttcattggtggatgggtattaaagatagcgagttcgatcacttttcgttcgttcaatttttctcaaactggccaaggtcattccactcgataatcgaagatgaagtagagttcaaccttgagcatgctgttgtcagcacgtctgaattacgactaaaagatcttcttggtcgattgtttttcggttcaattcggttacctgagcggaatcttcaacacaatatcatccttggtgagcttctctgctatttagaaaatcgtttatggcaagacaagggattaatcgccaacctcaaaatgaacgcgttagaggcgactgtaatgttaaattgtagcctcgatcagattgcatcaatggttgaacaacgcatcttgaagccaaatcgaaaaagcaagcccaacagccctcttgatgttaccgattatctatttcatttcggcgatattttctgtctttggttagctgagttccaaagcgatgagtttaaccgttcgttttatgtgtcgaggtggtaaatgcaaactctgaaagaactaatcgcatccaatcctgacgacttaacaactgaacttaagagagcatttcgtccactcacaccgcatattgcaattgatggtaatgaacttgacgcactgacgatattagtcaatttaaccgataagactgatgatcagaaagacctgctcgatcgagccaaatgcaagcaaaaacttcgagatgaaaaatggtgggctagctgcataaattgcgttaattacagacaaagccataacccaaaattcccggatatacgttctgaaggcgtgattcgaacccaagccctgggtgaattaccgagtttcctactctcgtcctcaaaaatcccaccataccattggtcatatagccatgattcaaaatacgtcaacaaaagcgcattcctcaccaatgagttttgttgggatggtgagatctcatgtttgggtgagcttcttaaagatgcagatcacccactttggaatactttgaaaaagttaggttgttctcaaaaaacttgcaaagcaatggcaaaacaactagctgatattactctcacgactatcaatgtcacactcgcaccaaattacctgactcaaatatctctccccgatagtgatacatcctacatttcactctctcctgttgcatcgctatcgatgcaaagccactttcatcagaggctccaagatgaaaatcggcatagcgcgataacgcggtttagccgaactaccaacatgggggtcactgcgatgacatgtggcggcgcatttagaatgttaaagtctggcgctaagttttccagcccccctcatcaccgattaaacagtaaacgaagttggttgacgtcagagcatgttcagtcattaaaacagtaccagcgcctcaacaaaagcctcatacctgaaaactctcggattgcactccgtagaaaatacaaaatcgagcttcaaaatatggtcagatcttggtttgcaatgcaagaccatacccttgattcgaacatacttatccaacatttgaatcatgacctatcttacttaggagccacaaaacgttttgcatacgatccagcgatgaccaagctctttactgagcttttgaaacgagagttatcaaattcaatcaataatggtgagcaacacactaatggatcgtttttagtcctaccgaatatcagggtttgtggcgcaacagctttaagctccccggtaacggtggggattccatcacttacagctttctttggcttcgttcacgcatttgaacggaatataaatcgcaccacctcatcgtttcgtgttgaatcctttgcgatatgcgtccatcaactacatgtcgagaagcgaggtttgacagcagagtttgtggaaaaaggcgacgggactatatccgctcccgcgacccgggatgactggcagtgtgatgtcgtatttagccttattttgaacaccaactttgctcaacatattgaccaagatacgttagttacatcactaccaaagcgattggctcggggttcagcaaaaattgcgattgatgactttaaacatatcaactcattctcgacattagaaacagcgatcgaatctctgccaatagaagctggtaggtggttatcactttacgcacagtcaaacaataatctaagtgatctattagcagccatgacagaggaccatcagctcatggcaagctgcgtcggttaccacttgttagaagagcccaaagataaaccaaactccctcagaggttacaaacacgctatcgccgagtgcatcattggactcattaactcaatcacctttagctcagagactgatcccaacacaatcttttggtcgctaaagaactatcaaaactacctagtggtacagccaaggagtatcaacgatgaaactaccgacaaatctagcctatgagcgctctatcgacccatcagatgtctgtttttttgtcgtctggcccgatgatagaaaaacacctttaacctacaattctcgtactctgctcgggcaaatggaagcggcatcattagcctatgatgtctcaggtcaaccaataaaaagtgccaccgctgaggcgttagctcaagggaaccctcatcaagttgatttctgccacgttccatacggtgcgagtcatattgaatgcagtttctccgtctcgttttcttctgaactacgtcaaccatataagtgtaactcaagcaaagttaaacaaacgctagtgcaattagtcgagctctacgaaacgaaaatcggctggactgagctagcaacccgatatttgatgaacatttgcaacggtaaatggctgtggaaaaatacccgtaaagcctattgctggaacattgtacttacaccttggccttggaacggggaaaaggttggatttgaagatattcgtactaactacacctcacggcaagactttaaaaataataaaaattggtctgctatagttgaaatgatcaaaaccgcattttctagtactgatgggctggcgatatttgaagtcagggccaccttgcacttgccaacgaatgctatggtgcggccaagccaagttttcacagaaaaagaaagtggcagtaaaagtaaatctaaaactcaaaacagtcgagtttttcagagtacaactattgatggtgaacgatcgccaatactaggggcctttaaaacgggagcagctattgcaaccattgacgactggtatcctgaagccactgagccactaagggtcggacggtttggggttcatcgcgaagatgtcacttgctaccgtcatccgtctaccggaaaagattttttctcgatattacaacaagcagagcactatattgaagtgttgagcgccaacaaaactcccgctcaagaaactatcaacgacatgcactttttaatggctaacctgattaagggtgggatgttccagcataaaggagactgactgtgaaatggtattataagacaatcacctttctgccagagttgtgcaacaacgagtcactggctgcaaagtgtctccgcgttctgcatggatttaactatcagtatgagacacgaaatatcggcgtttcatttccgctttggtgtgatgcaacggttggaaaaaagatttcatttgtcagcaagaacaagatagaactcgacttactacttaaacaacactatttcgtccaaatggaacaacttcaatactttcatatatccaacactgttctcgtcccagaagattgtacatacgtttcctttagacgctgtcaatctatagataagctcacagcagcagggctggcaaggaaaatcagacgcctggagaaacgtgctctatctagaggcgagcaatttgacccatcatcttttgctcaaaaagagcatactgcaatagcgcactaccactcacttggggagtccagcaaacagacgaaccgcaactttcgactcaatatcaggatgctctcggagcaaccccgtgaggggaactcgatttttagtagctatggcttatcaaattcagaaaactcgtttcagcctgtacccttaatctgacctttaataaggagatataccatggcgacaagtttacctacgccctcagcaattacgacttcggcgttagagtatgcattccatactcccgctcgcaatctaacgaaatctcgcggaaaaaacattcatcgttatgtcagtgtaaagatgagtaagaggattacggtagaatctactctagagtgtgatgcctgctatcactttgattttgagccaagtattgttcgcttttgcgctcaaccgattcgatttttatattatctcaatggtcagtctcactcctatgttcctgactttctagttcaatttgataccaacgagtttgttctatatgaagtaaagtcagcttatgctaagaacaaacctgattttgatgttgaatgggaggcgaaagtaaaagcagcaactgaactagggctagaattggagcttgttgaagagagtgatattagggatacggttgtattaaataatcttaagcgcatgcatcgttatgcttcgaaagatgagctgaataacgtacataactctctcttaaaaataataaagtacaatggcgcccaatctgcaagatgcttgggagaacagttgggtttaaaaggccgaactgttttaccaattttgtgcgatttgctgtcaaggtgtttactcgatacacgtttggataagcctctatctcttgaatctcgatttgagttggccagttatggctaagaaagggttctcaagtttccatagaaaagcagtctcttcccaagatacgcttgaatcgatagagcttgtctctagcgctaattgtctagaaagtgttacgtatcaagatatatcagcatttcccgaaacaattgcggtagagattaatttccgattaagcattcttcgctttttagcgcgaaagtgcgaaaccattgtggccaaatcaattgaaccacatcgtgtagagctacagcaaaactatagtagaaaaatacccagtgcaataacgatatatcgatggtggcttgcttttcgaaaatcagactacaaccccattagcttagcacctaatatcaaggatagaggtaatagagagacaaaagtgtcaacagttgttgattctattatggaacaggcagttgaaagagttatatctggacgaaaagtcaatgttagctctgcatataaacgtgttcgacgaaaagttcgtcaatacaatctaactcatggaacgaaatacacgtatcctaagtacgaatctgtaagaaagcgagtaaaaaagaaaaccccatttgagttattagccgcagggaaaggggagagagtagctaagagagagtttcgccgaatgggaaaaaagatcctcacgtctagcgtgctagagagggttgaaatagatcacactgtcgttgacctttttgcagtacacgaagagtatcgaatcccattgggccgaccttggcttactcaattggttgattgttacagtaaagctgtaatcggtttttatttaggtttcgagcctcctagctatgtgtcggtttcccttgcacttaagaatgcaatacaacgcaaagatgacttaatctcctcgtatgaatcgatcgagaatgaatggctatgttatggcatcccagacctactcgtaactgataatggtaaagagtttttgtcgaaagcatttgatcaagcatgtgaatcactattgatcaatgtgcatcaaaataaagttgagacgcccgacaacaaacctcatgttgaacgtaactacgggactattaatacttctctgttagacgatttacctgggaaatccttcagccagtaccttcaaagagaagggtacgactctgtgggagaagctacccttacactcaatgagattagagaaatttacttaatttggttggtggatatttatcataaaaaacccaatcagagaggcactaattgtcctaatgttgcgtggaaaaagggttgtcaagaatgggaaccagaggagttctctggttctaaagacgaattagactttaaatttgctattgttgattacaaacaacttactaaagtagggataactgtctacaaagaactgagttatagcaatgaccgtttagctgaatatagagggaagaaaggaaaccataaagttcagttcaagtataaccctgagtgtatggcagttatttgggtgttggatgaggatatgaatgagtactttacagttaatgcgattgactacgaatatgcaagtagagtatcactttggcaacataaatataacatgaaatatcaagcagaactaaattcagcagaatatgatgaggacaaggaaattgatgcagaaataaaaattgaagaaatcgcagatcgttcaattgttaagactaacaaaatcagagctcggaggcgtggcgctaggcatcaagagaatagcgcaagggctaagtcaatcagtaatgcgaacccggcctcgatacaaaaacatgaagatgaaatcgttagtgcagataatgacgattgggatattgattatgtctgagaaatcgtcaaatgagtgaaacgcgtgaggctcgtatatcaagagctaaaagggcatttgtatccacaccgagcgttaggaaaatcttgagttacatggatagatgtagagatctatcagacctagagtctgagcctacatgcatgatggtctatggtgcttcgggtgtaggtaaaacgaccgtcatcaagaaatacttaaatcaaaacagaagagagtccgaagccgggggcgatataataccggttttgcatattgagttgccagacaatgcgaagccagtagatgcagcaagggaattgctggttgaaatgggtgacccgctagcactttatgaaactgacttagctagattgacgaaaagactgactgaattaatccctgcggtcggcgtgaagctgattattatcgatgagttccaacatttggtggaagaaaggtcaaatcgggttcttacccaagtaggtaattggctaaaaatgatacttaacaaaacgaaatgtccaattgttatatttggtatgccatactcaaaagttgtactgcaagcaaactcgcaacttcacgggcgattttccattcaggttgaactgcgcccctttagctaccagggaggtagaggtgtatttaaaacttttttggaataccttgataaagccctaccttttgaaaaacaggctggcttagccaacgaaagtttgcagaaaaaattgtatgcattctctcagggaaacatgcgttcgttgagaaaccttatttatcaagcatctatcgaagcaattgataatcagcatgagacgataaccgaagaagatttcgtttttgcatcgaagttgacatcgggcgataaacccaactcatggaaaaatccttttgaggagggtgttgaggtaacagaagatatgttacgaccgccaccaaaagatattggttgggaggactatttgagacattcaaccccgagagtgagtaaaccaggtagaaataaaaactttttcgaataacctaggctgctgcgctgctgccaccgctgagcaataactagcataaccccttggggcctctaaacgggtcttgaggggttttttgctgaaacctcaggcatttgttgttgatacaaccataaaatgataattacacccataaattgataattatcacacccataaattgatattgcctcttcatggtctaaacttcagtaagtttacgacattttcctcgaggtcatttccggggatccatggagaaaaaaatcactggatataccaccgttgatatatcccaatggcatcgtaaagaacattttgaggcatttcagtcagttgctcaatgtacctataaccagaccgttcagctggatattacggcctttttaaagaccgtaaagaaaaataagcacaagttttatccggcctttattcacattcttgcccgcctgatgaatgctcatccggagttccgtatggcaatgaaagacggtgagctggtgatatgggatagtgttcacccttgttacaccgttttccatgagcaaactgaaacgttttcatcgctctggagtgaataccacgacgatttccggcagtttctacacatatattcgcaagatgtggcgtgttacggtgaaaacctggcctatttccctaaagggtttattgagaatatgtttttcgtctcagccaatccctgggtgagtttcaccagttttgatttaaacgtggccaatatggacaacttcttcgcccccgttttcactatgggcaaatattatacgcaaggcgacaaggtgctgatgccgctggcgattcaggttcatcatgccgtttgtgatggcttccatgtcggcagaatgcttaatgaattacaacagtactgcgatgagtggcagggcggggcgtaatttttttaaggcagttattggtgcccttctagagtccttactgcagtagttttgctgaaatactcgattcacaaaaatatcaacttatggttgttttgtgagatatcaatatatggttgttttgtggttaagttgctgattataaataattattaaatatcactttatggttgcatcaacaggtaccgagctcgaattcactggccgtcgttttacaacgtcgtgactgggaaaaccctggcgttacccaacttaatcgccttgccattttttaaccaataggccgtactgcgatgagtggcagggcggggcgtaatttttttaaggcagttattggtgcccttaaacgcctggttgctacgcctgaataagtgataataagcggatgaatggcagaaattcgaaagcaaattcgacccggtcgtcggttcagggcagggtcgttaaatagccgcttatgtctattgctggtttaccggtttattgactaccggaagcagtgtgaccgtgtgcttctcaaatgcctgaggccagtttgctcaggctctccccgtggaggtaataattgacgatatgatcatttattctgcctcccagagcctgataaaaacggtgaatccgttagcgaggtgccgccggcttccattcaggtcgaggtggcccggctccatgcaccgcgacgcaacgcggggaggcagacaaggtatagggcggcgaggcggctacagccgatagtctggaacagcgcacttacgggttgctgcgcaacccaagtgctaccggcgcggcagcgtgacccgtgtcggcggctccaacggctcgccatcgtccagaaaacacggctcatcgggcatcggcaggcgctgctgcccgcgccgttcccattcctccgtttcggtcaaggctggcaggtctggttccatgcccggaatgccgggctggctgggcggctcctcgccggggccggtcggtagttgctgctcgcccggatacagggtcgggatgcggcgcaggtcgccatgccccaacagcgattcgtcctggtcgtcgtgatcaaccaccacggcggcactgaacaccgacaggcgcaactggtcgcggggctggccccacgccacgcggtcattgaccacgtaggccgacacggtgccggggccgttgagcttcacgacggagatccagcgctcggccaccaagtccttgactgcgtattggaccgtccgcaaagaacgtccgatgagcttggaaagtgtcttctggctgaccaccacggcgttctggtggcccatctgcgccacgaggtgatgcagcagcattgccgccgtgggtttcctcgcaataagcccggcccacgcctcatgcgctttgcgttccgtttgcacccagtgaccgggcttgttcttggcttgaatgccgatttctctggactgcgtggccatgcttatctccatgcggtaggggtgccgcacggttgcggcaccatgcgcaatcagctgcaacttttcggcagcgcgacaacaattatgcgttgcgtaaaagtggcagtcaattacagattttctttaacctacgcaatgagctattgcggggggtgccgcaatgagctgttgcgtaccccccttttttaagttgttgatttttaagtctttcgcatttcgccctatatctagttctttggtgcccaaagaagggcacccctgcggggttcccccacgccttcggcgcggctccccctccggcaaaaagtggcccctccggggcttgttgatcgactgcgcggccttcggccttgcccaaggtggcgctgcccccttggaacccccgcactcgccgccgtgaggctcggggggcaggcgggcgggcttcgcccttcgactgcccccactcgcataggcttgggtcgttccaggcgcgtcaaggccaagccgctgcgcggtcgctgcgcgagccttgacccgccttccacttggtgtccaaccggcaagcgaagcgcgcaggccgcaggccggaggcttttccccagagaaaattaaaaaaattgatggggcaaggccgcaggccgcgcagttggagccggtgggtatgtggtcgaaggctgggtagccggtgggcaatccctgtggtcaagctcgtgggcaggcgcagcctgtccatcagcttgtccagcagggttgtccacgggccgagcgaagcgagccagccggtggccgctcgcggccatcgtccacatatccacgggctggcaagggagcgcagcgaccgcgcagggcgaagcccggagagcaagcccgtagggcgccgcagccgccgtaggcggtcacgactttgcgaagcaaagtctagtgagtatactcaagcattgagtggcccgccggaggcaccgccttgcgctgcccccgtcgagccggttggacaccaaaagggaggggcaggcatggcggcatacgcgatcatgcgatgcaagaagctggcgaaaatgggcaacgtggcggccagtctcaagcacgcctaccgcgagcgcgagacgcccaacgctgacgccagcaggacgccagagaacgagcactgggcggccagcagcaccgatgaagcgatgggccgactgcgcgagttgctgccagagaagcggcgcaaggacgctgtgttggcggtcgagtacgtcatgacggccagcccggaatggtggaagtcggccagccaagaacagcaggcggcgttcttcgagaaggcgcacaagtggctggcggacaagtacggggcggatcgcatcgtgacggccagcatccaccgtgacgaaaccagcccgcacatgaccgcgttcgtggtgccgctgacgcaggacggcaggctgtcggccaaggagttcatcggcaacaaagcgcagatgacccgcgaccagaccacgtttgcggccgctgtggccgatctagggctgcaacggggcatcgagggcagcaaggcacgtcacacgcgcattcaggcgttctacgaggccctggagcggccaccagtgggccacgtcaccatcagcccgcaagcggtcgagccacgcgcctatgcaccgcagggattggccgaaaagctgggaatctcaaagcgcgttgagacgccggaagccgtggccgaccggctgacaaaagcggttcggcaggggtatgagcctgccctacaggccgccgcaggagcgcgtgagatgcgcaagaaggccgatcaagcccaagagacggcccgagaccttcgggagcgcctgaagcccgttctggacgccctggggccgttgaatcgggatatgcaggccaaggccgccgcgatcatcaaggccgtgggcgaaaagctgctgacggaacagcgggaagtccagcgccagaaacaggcccagcgccagcaggaacgcgggcgcgcacatttccccgaaaagtgccacctgggatgaatgtcagctactgggctatctggacaagggaaaacgcaagcgcaaagagaaagcaggtagcttgcagtgggcttacatggcgatagctagactgggcggttttatggacagcaagcgaaccggaattgccagctggggcgccctctggtaaggttgggaagccctgcaaagtaaactggatggctttcttgccgccaaggatctgatggcgcaggggatcaagatctgatcaagagacaggatgaggatcgtttcgcatgattgaacaagatggattgcacgcaggttctccggccgcttgggtggagaggctattcggctatgactggg

SEQ ID NO: 24 - DNA, 14340 bp, artificial sequence
  Synthetic
cacaacagacaatcggctgctctgatgccgccgtgttccggctgtcagcgcaggggcgcccggttctttttgtcaagaccgacctgtccggtgccctgaatgaactgcaagacgaggcagcgcggctatcgtggctggccacgacgggcgttccttgcgcagctgtgctcgacgttgtcactgaagcgggaagggactggctgctattgggcgaagtgccggggcaggatctcctgtcatctcaccttgctcctgccgagaaagtatccatcatggctgatgcaatgcggcggctgcatacgcttgatccggctacctgcccattcgaccaccaagcgaaacatcgcatcgagcgagcacgtactcggatggaagccggtcttgtcgatcaggatgatctggacgaagagcatcaggggctcgcgccagccgaactgttcgccaggctcaaggcgcgcatgcccgacggcgaggatctcgtcgtgacccatggcgatgcctgcttgccgaatatcatggtggaaaatggccgcttttctggattcatcgactgtggccggctgggtgtggcggaccgctatcaggacatagcgttggctacccgtgatattgctgaagagcttggcggcgaatgggctgaccgcttcctcgtgctttacggtatcgccgctcccgattcgcagcgcatcgccttctatcgccttcttgacgagttcttctgagcgggactctggggttcgaaatgaccgaccaagcgacgcccaacctgccatcacgagatttcgattccaccgccgccttctatgaaaggttgggcttcggaatcgttttccgggacgccggctggatgatcctccagcgcggggatctcatgctggagttcttcgcccacccccatgggcaaatattatacgcaaggcgacaaggtgctgatgccgctggcgattcaggttcatcatgccgtttgtgatggcttccatgtcggcagaatgcttaatgaattacaacagtttttatgcatgcgcccaatacgcaaaccgcctctccccgcgcgttggccgattcattaatgcagctggcacgacaggtttcccgactggtggataaccgtattaccgcctttgagtgagctgataccgctcgccgcagccgaactaccgagcgcagcgagtcagtgagcgaggagcgactcctgcattaggaaattaatacgactcactataggggaattgtgagcggataacaattcccctgtagaaataattttgtttaactttaataaggagatataccatgggtgaactgccgagtaggtagctgataacgcattactaagctggcgcgtgaagctgtagaagtgaactgccgagtaggtagctgataacggatccgaattcgagcgaaggagatatacatatgtttttgcaaagacctaaaccttacagcgatgaaagtttagaaagtttctttatccgagtggctaacaaaaatggctacggtgatgtccatcgcttcctagaagccactaaacgattccttcaagacattgaccataatggctatcaaacctttccgactgatataactcggataaacccatactcagctaaaaacagttccagcgcacgaactgcgtcattcctgaaacttgcacaattgacatttaatgaaccgccagagctacttgggttggcaattaacagaacaaacatgaaatactcgccgtcaactagcgcggttgttagaggtgcagaagtctttcctcgcagtttactacggacgcactccatcccctgctgtcctttgtgtctgcgagaaaatggctacgcctcctacctttggcactttcaggggtacgaatactgccacagccataacgtacctttaattaccacttgtagctgtggtaaggagtttgactaccgagtatctgggttaaagggcatttgctgcaaatgcaaggagcctatcaccttaaccagcagggagaacggtcatgaggcagcgtgtactgtttcaaactggcttgctggccatgaatctaaacctctgccaaatcttcctaaaagctaccgatggggtttagttcattggtggatgggtattaaagatagcgagttcgatcacttttcgttcgttcaatttttctcaaactggccaaggtcattccactcgataatcgaagatgaagtagagttcaaccttgagcatgctgttgtcagcacgtctgaattacgactaaaagatcttcttggtcgattgtttttcggttcaattcggttacctgagcggaatcttcaacacaatatcatccttggtgagcttctctgctatttagaaaatcgtttatggcaagacaagggattaatcgccaacctcaaaatgaacgcgttagaggcgactgtaatgttaaattgtagcctcgatcagattgcatcaatggttgaacaacgcatcttgaagccaaatcgaaaaagcaagcccaacagccctcttgatgttaccgattatctatttcatttcggcgatattttctgtctttggttagctgagttccaaagcgatgagtttaaccgttcgttttatgtgtcgaggtggtaaatgcaaactctgaaagaactaatcgcatccaatcctgacgacttaacaactgaacttaagagagcatttcgtccactcacaccgcatattgcaattgatggtaatgaacttgacgcactgacgatattagtcaatttaaccgataagactgatgatcagaaagacctgctcgatcgagccaaatgcaagcaaaaacttcgagatgaaaaatggtgggctagctgcataaattgcgttaattacagacaaagccataacccaaaattcccggatatacgttctgaaggcgtgattcgaacccaagccctgggtgaattaccgagtttcctactctcgtcctcaaaaatcccaccataccattggtcatatagccatgattcaaaatacgtcaacaaaagcgcattcctcaccaatgagttttgttgggatggtgagatctcatgtttgggtgagcttcttaaagatgcagatcacccactttggaatactttgaaaaagttaggttgttctcaaaaaacttgcaaagcaatggcaaaacaactagctgatattactctcacgactatcaatgtcacactcgcaccaaattacctgactcaaatatctctccccgatagtgatacatcctacatttcactctctcctgttgcatcgctatcgatgcaaagccactttcatcagaggctccaagatgaaaatcggcatagcgcgataacgcggtttagccgaactaccaacatgggggtcactgcgatgacatgtggcggcgcatttagaatgttaaagtctggcgctaagttttccagcccccctcatcaccgattaaacagtaaacgaagttggttgacgtcagagcatgttcagtcattaaaacagtaccagcgcctcaacaaaagcctcatacctgaaaactctcggattgcactccgtagaaaatacaaaatcgagcttcaaaatatggtcagatcttggtttgcaatgcaagaccatacccttgattcgaacatacttatccaacatttgaatcatgacctatcttacttaggagccacaaaacgttttgcatacgatccagcgatgaccaagctctttactgagcttttgaaacgagagttatcaaattcaatcaataatggtgagcaacacactaatggatcgtttttagtcctaccgaatatcagggtttgtggcgcaacagctttaagctccccggtaacggtggggattccatcacttacagctttctttggcttcgttcacgcatttgaacggaatataaatcgcaccacctcatcgtttcgtgttgaatcctttgcgatatgcgtccatcaactacatgtcgagaagcgaggtttgacagcagagtttgtggaaaaaggcgacgggactatatccgctcccgcgacccgggatgactggcagtgtgatgtcgtatttagccttattttgaacaccaactttgctcaacatattgaccaagatacgttagttacatcactaccaaagcgattggctcggggttcagcaaaaattgcgattgatgactttaaacatatcaactcattctcgacattagaaacagcgatcgaatctctgccaatagaagctggtaggtggttatcactttacgcacagtcaaacaataatctaagtgatctattagcagccatgacagaggaccatcagctcatggcaagctgcgtcggttaccacttgttagaagagcccaaagataaaccaaactccctcagaggttacaaacacgctatcgccgagtgcatcattggactcattaactcaatcacctttagctcagagactgatcccaacacaatcttttggtcgctaaagaactatcaaaactacctagtggtacagccaaggagtatcaacgatgaaactaccgacaaatctagcctatgagcgctctatcgacccatcagatgtctgtttttttgtcgtctggcccgatgatagaaaaacacctttaacctacaattctcgtactctgctcgggcaaatggaagcggcatcattagcctatgatgtctcaggtcaaccaataaaaagtgccaccgctgaggcgttagctcaagggaaccctcatcaagttgatttctgccacgttccatacggtgcgagtcatattgaatgcagtttctccgtctcgttttcttctgaactacgtcaaccatataagtgtaactcaagcaaagttaaacaaacgctagtgcaattagtcgagctctacgaaacgaaaatcggctggactgagctagcaacccgatatttgatgaacatttgcaacggtaaatggctgtggaaaaatacccgtaaagcctattgctggaacattgtacttacaccttggccttggaacggggaaaaggttggatttgaagatattcgtactaactacacctcacggcaagactttaaaaataataaaaattggtctgctatagttgaaatgatcaaaaccgcattttctagtactgatgggctggcgatatttgaagtcagggccaccttgcacttgccaacgaatgctatggtgcggccaagccaagttttcacagaaaaagaaagtggcagtaaaagtaaatctaaaactcaaaacagtcgagtttttcagagtacaactattgatggtgaacgatcgccaatactaggggcctttaaaacgggagcagctattgcaaccattgacgactggtatcctgaagccactgagccactaagggtcggacggtttggggttcatcgcgaagatgtcacttgctaccgtcatccgtctaccggaaaagattttttctcgatattacaacaagcagagcactatattgaagtgttgagcgccaacaaaactcccgctcaagaaactatcaacgacatgcactttttaatggctaacctgattaagggtgggatgttccagcataaaggagactgactgtgaaatggtattataagacaatcacctttctgccagagttgtgcaacaacgagtcactggctgcaaagtgtctccgcgttctgcatggatttaactatcagtatgagacacgaaatatcggcgtttcatttccgctttggtgtgatgcaacggttggaaaaaagatttcatttgtcagcaagaacaagatagaactcgacttactacttaaacaacactatttcgtccaaatggaacaacttcaatactttcatatatccaacactgttctcgtcccagaagattgtacatacgtttcctttagacgctgtcaatctatagataagctcacagcagcagggctggcaaggaaaatcagacgcctggagaaacgtgctctatctagaggcgagcaatttgacccatcatcttttgctcaaaaagagcatactgcaatagcgcactaccactcacttggggagtccagcaaacagacgaaccgcaactttcgactcaatatcaggatgctctcggagcaaccccgtgaggggaactcgatttttagtagctatggcttatcaaattcagaaaactcgtttcagcctgtacccttaatctgacctttaataaggagatataccatggcgacaagtttacctacgccctcagcaattacgacttcggcgttagagtatgcattccatactcccgctcgcaatctaacgaaatctcgcggaaaaaacattcatcgttatgtcagtgtaaagatgagtaagaggattacggtagaatctactctagagtgtgatgcctgctatcactttgattttgagccaagtattgttcgcttttgcgctcaaccgattcgatttttatattatctcaatggtcagtctcactcctatgttcctgactttctagttcaatttgataccaacgagtttgttctatatgaagtaaagtcagcttatgctaagaacaaacctgattttgatgttgaatgggaggcgaaagtaaaagcagcaactgaactagggctagaattggagcttgttgaagagagtgatattagggatacggttgtattaaataatcttaagcgcatgcatcgttatgcttcgaaagatgagctgaataacgtacataactctctcttaaaaataataaagtacaatggcgcccaatctgcaagatgcttgggagaacagttgggtttaaaaggccgaactgttttaccaattttgtgcgatttgctgtcaaggtgtttactcgatacacgtttggataagcctctatctcttgaatctcgatttgagttggccagttatggctaagaaagggttctcaagtttccatagaaaagcagtctcttcccaagatacgcttgaatcgatagagcttgtctctagcgctaattgtctagaaagtgttacgtatcaagatatatcagcatttcccgaaacaattgcggtagagattaatttccgattaagcattcttcgctttttagcgcgaaagtgcgaaaccattgtggccaaatcaattgaaccacatcgtgtagagctacagcaaaactatagtagaaaaatacccagtgcaataacgatatatcgatggtggcttgcttttcgaaaatcagactacaaccccattagcttagcacctaatatcaaggatagaggtaatagagagacaaaagtgtcaacagttgttgattctattatggaacaggcagttgaaagagttatatctggacgaaaagtcaatgttagctctgcatataaacgtgttcgacgaaaagttcgtcaatacaatctaactcatggaacgaaatacacgtatcctaagtacgaatctgtaagaaagcgagtaaaaaagaaaaccccatttgagttattagccgcagggaaaggggagagagtagctaagagagagtttcgccgaatgggaaaaaagatcctcacgtctagcgtgctagagagggttgaaatagatcacactgtcgttgacctttttgcagtacacgaagagtatcgaatcccattgggccgaccttggcttactcaattggttgattgttacagtaaagctgtaatcggtttttatttaggtttcgagcctcctagctatgtgtcggtttcccttgcacttaagaatgcaatacaacgcaaagatgacttaatctcctcgtatgaatcgatcgagaatgaatggctatgttatggcatcccagacctactcgtaactgataatggtaaagagtttttgtcgaaagcatttgatcaagcatgtgaatcactattgatcaatgtgcatcaaaataaagttgagacgcccgacaacaaacctcatgttgaacgtaactacgggactattaatacttctctgttagacgatttacctgggaaatccttcagccagtaccttcaaagagaagggtacgactctgtgggagaagctacccttacactcaatgagattagagaaatttacttaatttggttggtggatatttatcataaaaaacccaatcagagaggcactaattgtcctaatgttgcgtggaaaaagggttgtcaagaatgggaaccagaggagttctctggttctaaagacgaattagactttaaatttgctattgttgattacaaacaacttactaaagtagggataactgtctacaaagaactgagttatagcaatgaccgtttagctgaatatagagggaagaaaggaaaccataaagttcagttcaagtataaccctgagtgtatggcagttatttgggtgttggatgaggatatgaatgagtactttacagttaatgcgattgactacgaatatgcaagtagagtatcactttggcaacataaatataacatgaaatatcaagcagaactaaattcagcagaatatgatgaggacaaggaaattgatgcagaaataaaaattgaagaaatcgcagatcgttcaattgttaagactaacaaaatcagagctcggaggcgtggcgctaggcatcaagagaatagcgcaagggctaagtcaatcagtaatgcgaacccggcctcgatacaaaaacatgaagatgaaatcgttagtgcagataatgacgattgggatattgattatgtctgagaaatcgtcaaatgagtgaaacgcgtgaggctcgtatatcaagagctaaaagggcatttgtatccacaccgagcgttaggaaaatcttgagttacatggatagatgtagagatctatcagacctagagtctgagcctacatgcatgatggtctatggtgcttcgggtgtaggtaaaacgaccgtcatcaagaaatacttaaatcaaaacagaagagagtccgaagccgggggcgatataataccggttttgcatattgagttgccagacaatgcgaagccagtagatgcagcaagggaattgctggttgaaatgggtgacccgctagcactttatgaaactgacttagctagattgacgaaaagactgactgaattaatccctgcggtcggcgtgaagctgattattatcgatgagttccaacatttggtggaagaaaggtcaaatcgggttcttacccaagtaggtaattggctaaaaatgatacttaacaaaacgaaatgtccaattgttatatttggtatgccatactcaaaagttgtactgcaagcaaactcgcaacttcacgggcgattttccattcaggttgaactgcgcccctttagctaccagggaggtagaggtgtatttaaaacttttttggaataccttgataaagccctaccttttgaaaaacaggctggcttagccaacgaaagtttgcagaaaaaattgtatgcattctctcagggaaacatgcgttcgttgagaaaccttatttatcaagcatctatcgaagcaattgataatcagcatgagacgataaccgaagaagatttcgtttttgcatcgaagttgacatcgggcgataaacccaactcatggaaaaatccttttgaggagggtgttgaggtaacagaagatatgttacgaccgccaccaaaagatattggttgggaggactatttgagacattcaaccccgagagtgagtaaaccaggtagaaataaaaactttttcgaataacctaggctgctgcgctgctgccaccgctgagcaataactagcataaccccttggggcctctaaacgggtcttgaggggttttttgctgaaacctcaggcatttgttgttgatacaaccataaaatgataattacacccataaattgataattatcacacccataaattgatattgcctcttcatggtctaaacttcagtaagtttacgacattttcctcgaggtcatttccggggatccatggagaaaaaaatcactggatataccaccgttgatatatcccaatggcatcgtaaagaacattttgaggcatttcagtcagttgctcaatgtacctataaccagaccgttcagctggatattacggcctttttaaagaccgtaaagaaaaataagcacaagttttatccggcctttattcacattcttgcccgcctgatgaatgctcatccggagttccgtatggcaatgaaagacggtgagctggtgatatgggatagtgttcacccttgttacaccgttttccatgagcaaactgaaacgttttcatcgctctggagtgaataccacgacgatttccggcagtttctacacatatattcgcaagatgtggcgtgttacggtgaaaacctggcctatttccctaaagggtttattgagaatatgtttttcgtctcagccaatccctgggtgagtttcaccagttttgatttaaacgtggccaatatggacaacttcttcgcccccgttttcactatgggcaaatattatacgcaaggcgacaaggtgctgatgccgctggcgattcaggttcatcatgccgtttgtgatggcttccatgtcggcagaatgcttaatgaattacaacagtactgcgatgagtggcagggcggggcgtaatttttttaaggcagttattggtgcccttctagagtccttactgcagtagttttgctgaaatactcgattcacaaaaatatcaacttatggttgttttgtgagatatcaatatatggttgttttgtggttaagttgctgattataaataattattaaatatcactttatggttgcatcaacaggtaccgagctcgaattcactggccgtcgttttacaacgtcgtgactgggaaaaccctggcgttacccaacttaatcgccttgccattttttaaccaataggccgtactgcgatgagtggcagggcggggcgtaatttttttaaggcagttattggtgcccttaaacgcctggttgctacgcctgaataagtgataataagcggatgaatggcagaaattcgaaagcaaattcgacccggtcgtcggttcagggcagggtcgttaaatagccgcttatgtctattgctggtttaccggtttattgactaccggaagcagtgtgaccgtgtgcttctcaaatgcctgaggccagtttgctcaggctctccccgtggaggtaataattgacgatatgatcatttattctgcctcccagagcctgataaaaacggtgaatccgttagcgaggtgccgccggcttccattcaggtcgaggtggcccggctccatgcaccgcgacgcaacgcggggaggcagacaaggtatagggcggcgaggcggctacagccgatagtctggaacagcgcacttacgggttgctgcgcaacccaagtgctaccggcgcggcagcgtgacccgtgtcggcggctccaacggctcgccatcgtccagaaaacacggctcatcgggcatcggcaggcgctgctgcccgcgccgttcccattcctccgtttcggtcaaggctggcaggtctggttccatgcccggaatgccgggctggctgggcggctcctcgccggggccggtcggtagttgctgctcgcccggatacagggtcgggatgcggcgcaggtcgccatgccccaacagcgattcgtcctggtcgtcgtgatcaaccaccacggcggcactgaacaccgacaggcgcaactggtcgcggggctggccccacgccacgcggtcattgaccacgtaggccgacacggtgccggggccgttgagcttcacgacggagatccagcgctcggccaccaagtccttgactgcgtattggaccgtccgcaaagaacgtccgatgagcttggaaagtgtcttctggctgaccaccacggcgttctggtggcccatctgcgccacgaggtgatgcagcagcattgccgccgtgggtttcctcgcaataagcccggcccacgcctcatgcgctttgcgttccgtttgcacccagtgaccgggcttgttcttggcttgaatgccgatttctctggactgcgtggccatgcttatctccatgcggtaggggtgccgcacggttgcggcaccatgcgcaatcagctgcaacttttcggcagcgcgacaacaattatgcgttgcgtaaaagtggcagtcaattacagattttctttaacctacgcaatgagctattgcggggggtgccgcaatgagctgttgcgtaccccccttttttaagttgttgatttttaagtctttcgcatttcgccctatatctagttctttggtgcccaaagaagggcacccctgcggggttcccccacgccttcggcgcggctccccctccggcaaaaagtggcccctccggggcttgttgatcgactgcgcggccttcggccttgcccaaggtggcgctgcccccttggaacccccgcactcgccgccgtgaggctcggggggcaggcgggcgggcttcgcccttcgactgcccccactcgcataggcttgggtcgttccaggcgcgtcaaggccaagccgctgcgcggtcgctgcgcgagccttgacccgccttccacttggtgtccaaccggcaagcgaagcgcgcaggccgcaggccggaggcttttccccagagaaaattaaaaaaattgatggggcaaggccgcaggccgcgcagttggagccggtgggtatgtggtcgaaggctgggtagccggtgggcaatccctgtggtcaagctcgtgggcaggcgcagcctgtccatcagcttgtccagcagggttgtccacgggccgagcgaagcgagccagccggtggccgctcgcggccatcgtccacatatccacgggctggcaagggagcgcagcgaccgcgcagggcgaagcccggagagcaagcccgtagggcgccgcagccgccgtaggcggtcacgactttgcgaagcaaagtctagtgagtatactcaagcattgagtggcccgccggaggcaccgccttgcgctgcccccgtcgagccggttggacaccaaaagggaggggcaggcatggcggcatacgcgatcatgcgatgcaagaagctggcgaaaatgggcaacgtggcggccagtctcaagcacgcctaccgcgagcgcgagacgcccaacgctgacgccagcaggacgccagagaacgagcactgggcggccagcagcaccgatgaagcgatgggccgactgcgcgagttgctgccagagaagcggcgcaaggacgctgtgttggcggtcgagtacgtcatgacggccagcccggaatggtggaagtcggccagccaagaacagcaggcggcgttcttcgagaaggcgcacaagtggctggcggacaagtacggggcggatcgcatcgtgacggccagcatccaccgtgacgaaaccagcccgcacatgaccgcgttcgtggtgccgctgacgcaggacggcaggctgtcggccaaggagttcatcggcaacaaagcgcagatgacccgcgaccagaccacgtttgcggccgctgtggccgatctagggctgcaacggggcatcgagggcagcaaggcacgtcacacgcgcattcaggcgttctacgaggccctggagcggccaccagtgggccacgtcaccatcagcccgcaagcggtcgagccacgcgcctatgcaccgcagggattggccgaaaagctgggaatctcaaagcgcgttgagacgccggaagccgtggccgaccggctgacaaaagcggttcggcaggggtatgagcctgccctacaggccgccgcaggagcgcgtgagatgcgcaagaaggccgatcaagcccaagagacggcccgagaccttcgggagcgcctgaagcccgttctggacgccctggggccgttgaatcgggatatgcaggccaaggccgccgcgatcatcaaggccgtgggcgaaaagctgctgacggaacagcgggaagtccagcgccagaaacaggcccagcgccagcaggaacgcgggcgcgcacatttccccgaaaagtgccacctgggatgaatgtcagctactgggctatctggacaagggaaaacgcaagcgcaaagagaaagcaggtagcttgcagtgggcttacatggcgatagctagactgggcggttttatggacagcaagcgaaccggaattgccagctggggcgccctctggtaaggttgggaagccctgcaaagtaaactggatggctttcttgccgccaaggatctgatggcgcaggggatcaagatctgatcaagagacaggatgaggatcgtttcgcatgattgaacaagatggattgcacgcaggttctccggccgcttgggtggagaggctattcggctatgactggg

SEQ ID NO: 25 - DNA, 14340 bp, artificial sequence
  Synthetic
cacaacagacaatcggctgctctgatgccgccgtgttccggctgtcagcgcaggggcgcccggttctttttgtcaagaccgacctgtccggtgccctgaatgaactgcaagacgaggcagcgcggctatcgtggctggccacgacgggcgttccttgcgcagctgtgctcgacgttgtcactgaagcgggaagggactggctgctattgggcgaagtgccggggcaggatctcctgtcatctcaccttgctcctgccgagaaagtatccatcatggctgatgcaatgcggcggctgcatacgcttgatccggctacctgcccattcgaccaccaagcgaaacatcgcatcgagcgagcacgtactcggatggaagccggtcttgtcgatcaggatgatctggacgaagagcatcaggggctcgcgccagccgaactgttcgccaggctcaaggcgcgcatgcccgacggcgaggatctcgtcgtgacccatggcgatgcctgcttgccgaatatcatggtggaaaatggccgcttttctggattcatcgactgtggccggctgggtgtggcggaccgctatcaggacatagcgttggctacccgtgatattgctgaagagcttggcggcgaatgggctgaccgcttcctcgtgctttacggtatcgccgctcccgattcgcagcgcatcgccttctatcgccttcttgacgagttcttctgagcgggactctggggttcgaaatgaccgaccaagcgacgcccaacctgccatcacgagatttcgattccaccgccgccttctatgaaaggttgggcttcggaatcgttttccgggacgccggctggatgatcctccagcgcggggatctcatgctggagttcttcgcccacccccatgggcaaatattatacgcaaggcgacaaggtgctgatgccgctggcgattcaggttcatcatgccgtttgtgatggcttccatgtcggcagaatgcttaatgaattacaacagtttttatgcatgcgcccaatacgcaaaccgcctctccccgcgcgttggccgattcattaatgcagctggcacgacaggtttcccgactggtggataaccgtattaccgcctttgagtgagctgataccgctcgccgcagccgaactaccgagcgcagcgagtcagtgagcgaggagcgactcctgcattaggaaattaatacgactcactataggggaattgtgagcggataacaattcccctgtagaaataattttgtttaactttaataaggagatataccatgggtgaactgccgagtaggtagctgataacgagaatattgtggcaaaagcgcataaggtgctgtgaactgccgagtaggtagctgataacggatccgaattcgagcgaaggagatatacatatgtttttgcaaagacctaaaccttacagcgatgaaagtttagaaagtttctttatccgagtggctaacaaaaatggctacggtgatgtccatcgcttcctagaagccactaaacgattccttcaagacattgaccataatggctatcaaacctttccgactgatataactcggataaacccatactcagctaaaaacagttccagcgcacgaactgcgtcattcctgaaacttgcacaattgacatttaatgaaccgccagagctacttgggttggcaattaacagaacaaacatgaaatactcgccgtcaactagcgcggttgttagaggtgcagaagtctttcctcgcagtttactacggacgcactccatcccctgctgtcctttgtgtctgcgagaaaatggctacgcctcctacctttggcactttcaggggtacgaatactgccacagccataacgtacctttaattaccacttgtagctgtggtaaggagtttgactaccgagtatctgggttaaagggcatttgctgcaaatgcaaggagcctatcaccttaaccagcagggagaacggtcatgaggcagcgtgtactgtttcaaactggcttgctggccatgaatctaaacctctgccaaatcttcctaaaagctaccgatggggtttagttcattggtggatgggtattaaagatagcgagttcgatcacttttcgttcgttcaatttttctcaaactggccaaggtcattccactcgataatcgaagatgaagtagagttcaaccttgagcatgctgttgtcagcacgtctgaattacgactaaaagatcttcttggtcgattgtttttcggttcaattcggttacctgagcggaatcttcaacacaatatcatccttggtgagcttctctgctatttagaaaatcgtttatggcaagacaagggattaatcgccaacctcaaaatgaacgcgttagaggcgactgtaatgttaaattgtagcctcgatcagattgcatcaatggttgaacaacgcatcttgaagccaaatcgaaaaagcaagcccaacagccctcttgatgttaccgattatctatttcatttcggcgatattttctgtctttggttagctgagttccaaagcgatgagtttaaccgttcgttttatgtgtcgaggtggtaaatgcaaactctgaaagaactaatcgcatccaatcctgacgacttaacaactgaacttaagagagcatttcgtccactcacaccgcatattgcaattgatggtaatgaacttgacgcactgacgatattagtcaatttaaccgataagactgatgatcagaaagacctgctcgatcgagccaaatgcaagcaaaaacttcgagatgaaaaatggtgggctagctgcataaattgcgttaattacagacaaagccataacccaaaattcccggatatacgttctgaaggcgtgattcgaacccaagccctgggtgaattaccgagtttcctactctcgtcctcaaaaatcccaccataccattggtcatatagccatgattcaaaatacgtcaacaaaagcgcattcctcaccaatgagttttgttgggatggtgagatctcatgtttgggtgagcttcttaaagatgcagatcacccactttggaatactttgaaaaagttaggttgttctcaaaaaacttgcaaagcaatggcaaaacaactagctgatattactctcacgactatcaatgtcacactcgcaccaaattacctgactcaaatatctctccccgatagtgatacatcctacatttcactctctcctgttgcatcgctatcgatgcaaagccactttcatcagaggctccaagatgaaaatcggcatagcgcgataacgcggtttagccgaactaccaacatgggggtcactgcgatgacatgtggcggcgcatttagaatgttaaagtctggcgctaagttttccagcccccctcatcaccgattaaacagtaaacgaagttggttgacgtcagagcatgttcagtcattaaaacagtaccagcgcctcaacaaaagcctcatacctgaaaactctcggattgcactccgtagaaaatacaaaatcgagcttcaaaatatggtcagatcttggtttgcaatgcaagaccatacccttgattcgaacatacttatccaacatttgaatcatgacctatcttacttaggagccacaaaacgttttgcatacgatccagcgatgaccaagctctttactgagcttttgaaacgagagttatcaaattcaatcaataatggtgagcaacacactaatggatcgtttttagtcctaccgaatatcagggtttgtggcgcaacagctttaagctccccggtaacggtggggattccatcacttacagctttctttggcttcgttcacgcatttgaacggaatataaatcgcaccacctcatcgtttcgtgttgaatcctttgcgatatgcgtccatcaactacatgtcgagaagcgaggtttgacagcagagtttgtggaaaaaggcgacgggactatatccgctcccgcgacccgggatgactggcagtgtgatgtcgtatttagccttattttgaacaccaactttgctcaacatattgaccaagatacgttagttacatcactaccaaagcgattggctcggggttcagcaaaaattgcgattgatgactttaaacatatcaactcattctcgacattagaaacagcgatcgaatctctgccaatagaagctggtaggtggttatcactttacgcacagtcaaacaataatctaagtgatctattagcagccatgacagaggaccatcagctcatggcaagctgcgtcggttaccacttgttagaagagcccaaagataaaccaaactccctcagaggttacaaacacgctatcgccgagtgcatcattggactcattaactcaatcacctttagctcagagactgatcccaacacaatcttttggtcgctaaagaactatcaaaactacctagtggtacagccaaggagtatcaacgatgaaactaccgacaaatctagcctatgagcgctctatcgacccatcagatgtctgtttttttgtcgtctggcccgatgatagaaaaacacctttaacctacaattctcgtactctgctcgggcaaatggaagcggcatcattagcctatgatgtctcaggtcaaccaataaaaagtgccaccgctgaggcgttagctcaagggaaccctcatcaagttgatttctgccacgttccatacggtgcgagtcatattgaatgcagtttctccgtctcgttttcttctgaactacgtcaaccatataagtgtaactcaagcaaagttaaacaaacgctagtgcaattagtcgagctctacgaaacgaaaatcggctggactgagctagcaacccgatatttgatgaacatttgcaacggtaaatggctgtggaaaaatacccgtaaagcctattgctggaacattgtacttacaccttggccttggaacggggaaaaggttggatttgaagatattcgtactaactacacctcacggcaagactttaaaaataataaaaattggtctgctatagttgaaatgatcaaaaccgcattttctagtactgatgggctggcgatatttgaagtcagggccaccttgcacttgccaacgaatgctatggtgcggccaagccaagttttcacagaaaaagaaagtggcagtaaaagtaaatctaaaactcaaaacagtcgagtttttcagagtacaactattgatggtgaacgatcgccaatactaggggcctttaaaacgggagcagctattgcaaccattgacgactggtatcctgaagccactgagccactaagggtcggacggtttggggttcatcgcgaagatgtcacttgctaccgtcatccgtctaccggaaaagattttttctcgatattacaacaagcagagcactatattgaagtgttgagcgccaacaaaactcccgctcaagaaactatcaacgacatgcactttttaatggctaacctgattaagggtgggatgttccagcataaaggagactgactgtgaaatggtattataagacaatcacctttctgccagagttgtgcaacaacgagtcactggctgcaaagtgtctccgcgttctgcatggatttaactatcagtatgagacacgaaatatcggcgtttcatttccgctttggtgtgatgcaacggttggaaaaaagatttcatttgtcagcaagaacaagatagaactcgacttactacttaaacaacactatttcgtccaaatggaacaacttcaatactttcatatatccaacactgttctcgtcccagaagattgtacatacgtttcctttagacgctgtcaatctatagataagctcacagcagcagggctggcaaggaaaatcagacgcctggagaaacgtgctctatctagaggcgagcaatttgacccatcatcttttgctcaaaaagagcatactgcaatagcgcactaccactcacttggggagtccagcaaacagacgaaccgcaactttcgactcaatatcaggatgctctcggagcaaccccgtgaggggaactcgatttttagtagctatggcttatcaaattcagaaaactcgtttcagcctgtacccttaatctgacctttaataaggagatataccatggcgacaagtttacctacgccctcagcaattacgacttcggcgttagagtatgcattccatactcccgctcgcaatctaacgaaatctcgcggaaaaaacattcatcgttatgtcagtgtaaagatgagtaagaggattacggtagaatctactctagagtgtgatgcctgctatcactttgattttgagccaagtattgttcgcttttgcgctcaaccgattcgatttttatattatctcaatggtcagtctcactcctatgttcctgactttctagttcaatttgataccaacgagtttgttctatatgaagtaaagtcagcttatgctaagaacaaacctgattttgatgttgaatgggaggcgaaagtaaaagcagcaactgaactagggctagaattggagcttgttgaagagagtgatattagggatacggttgtattaaataatcttaagcgcatgcatcgttatgcttcgaaagatgagctgaataacgtacataactctctcttaaaaataataaagtacaatggcgcccaatctgcaagatgcttgggagaacagttgggtttaaaaggccgaactgttttaccaattttgtgcgatttgctgtcaaggtgtttactcgatacacgtttggataagcctctatctcttgaatctcgatttgagttggccagttatggctaagaaagggttctcaagtttccatagaaaagcagtctcttcccaagatacgcttgaatcgatagagcttgtctctagcgctaattgtctagaaagtgttacgtatcaagatatatcagcatttcccgaaacaattgcggtagagattaatttccgattaagcattcttcgctttttagcgcgaaagtgcgaaaccattgtggccaaatcaattgaaccacatcgtgtagagctacagcaaaactatagtagaaaaatacccagtgcaataacgatatatcgatggtggcttgcttttcgaaaatcagactacaaccccattagcttagcacctaatatcaaggatagaggtaatagagagacaaaagtgtcaacagttgttgattctattatggaacaggcagttgaaagagttatatctggacgaaaagtcaatgttagctctgcatataaacgtgttcgacgaaaagttcgtcaatacaatctaactcatggaacgaaatacacgtatcctaagtacgaatctgtaagaaagcgagtaaaaaagaaaaccccatttgagttattagccgcagggaaaggggagagagtagctaagagagagtttcgccgaatgggaaaaaagatcctcacgtctagcgtgctagagagggttgaaatagatcacactgtcgttgacctttttgcagtacacgaagagtatcgaatcccattgggccgaccttggcttactcaattggttgattgttacagtaaagctgtaatcggtttttatttaggtttcgagcctcctagctatgtgtcggtttcccttgcacttaagaatgcaatacaacgcaaagatgacttaatctcctcgtatgaatcgatcgagaatgaatggctatgttatggcatcccagacctactcgtaactgataatggtaaagagtttttgtcgaaagcatttgatcaagcatgtgaatcactattgatcaatgtgcatcaaaataaagttgagacgcccgacaacaaacctcatgttgaacgtaactacgggactattaatacttctctgttagacgatttacctgggaaatccttcagccagtaccttcaaagagaagggtacgactctgtgggagaagctacccttacactcaatgagattagagaaatttacttaatttggttggtggatatttatcataaaaaacccaatcagagaggcactaattgtcctaatgttgcgtggaaaaagggttgtcaagaatgggaaccagaggagttctctggttctaaagacgaattagactttaaatttgctattgttgattacaaacaacttactaaagtagggataactgtctacaaagaactgagttatagcaatgaccgtttagctgaatatagagggaagaaaggaaaccataaagttcagttcaagtataaccctgagtgtatggcagttatttgggtgttggatgaggatatgaatgagtactttacagttaatgcgattgactacgaatatgcaagtagagtatcactttggcaacataaatataacatgaaatatcaagcagaactaaattcagcagaatatgatgaggacaaggaaattgatgcagaaataaaaattgaagaaatcgcagatcgttcaattgttaagactaacaaaatcagagctcggaggcgtggcgctaggcatcaagagaatagcgcaagggctaagtcaatcagtaatgcgaacccggcctcgatacaaaaacatgaagatgaaatcgttagtgcagataatgacgattgggatattgattatgtctgagaaatcgtcaaatgagtgaaacgcgtgaggctcgtatatcaagagctaaaagggcatttgtatccacaccgagcgttaggaaaatcttgagttacatggatagatgtagagatctatcagacctagagtctgagcctacatgcatgatggtctatggtgcttcgggtgtaggtaaaacgaccgtcatcaagaaatacttaaatcaaaacagaagagagtccgaagccgggggcgatataataccggttttgcatattgagttgccagacaatgcgaagccagtagatgcagcaagggaattgctggttgaaatgggtgacccgctagcactttatgaaactgacttagctagattgacgaaaagactgactgaattaatccctgcggtcggcgtgaagctgattattatcgatgagttccaacatttggtggaagaaaggtcaaatcgggttcttacccaagtaggtaattggctaaaaatgatacttaacaaaacgaaatgtccaattgttatatttggtatgccatactcaaaagttgtactgcaagcaaactcgcaacttcacgggcgattttccattcaggttgaactgcgcccctttagctaccagggaggtagaggtgtatttaaaacttttttggaataccttgataaagccctaccttttgaaaaacaggctggcttagccaacgaaagtttgcagaaaaaattgtatgcattctctcagggaaacatgcgttcgttgagaaaccttatttatcaagcatctatcgaagcaattgataatcagcatgagacgataaccgaagaagatttcgtttttgcatcgaagttgacatcgggcgataaacccaactcatggaaaaatccttttgaggagggtgttgaggtaacagaagatatgttacgaccgccaccaaaagatattggttgggaggactatttgagacattcaaccccgagagtgagtaaaccaggtagaaataaaaactttttcgaataacctaggctgctgcgctgctgccaccgctgagcaataactagcataaccccttggggcctctaaacgggtcttgaggggttttttgctgaaacctcaggcatttgttgttgatacaaccataaaatgataattacacccataaattgataattatcacacccataaattgatattgcctcttcatggtctaaacttcagtaagtttacgacattttcctcgaggtcatttccggggatccatggagaaaaaaatcactggatataccaccgttgatatatcccaatggcatcgtaaagaacattttgaggcatttcagtcagttgctcaatgtacctataaccagaccgttcagctggatattacggcctttttaaagaccgtaaagaaaaataagcacaagttttatccggcctttattcacattcttgcccgcctgatgaatgctcatccggagttccgtatggcaatgaaagacggtgagctggtgatatgggatagtgttcacccttgttacaccgttttccatgagcaaactgaaacgttttcatcgctctggagtgaataccacgacgatttccggcagtttctacacatatattcgcaagatgtggcgtgttacggtgaaaacctggcctatttccctaaagggtttattgagaatatgtttttcgtctcagccaatccctgggtgagtttcaccagttttgatttaaacgtggccaatatggacaacttcttcgcccccgttttcactatgggcaaatattatacgcaaggcgacaaggtgctgatgccgctggcgattcaggttcatcatgccgtttgtgatggcttccatgtcggcagaatgcttaatgaattacaacagtactgcgatgagtggcagggcggggcgtaatttttttaaggcagttattggtgcccttctagagtccttactgcagtagttttgctgaaatactcgattcacaaaaatatcaacttatggttgttttgtgagatatcaatatatggttgttttgtggttaagttgctgattataaataattattaaatatcactttatggttgcatcaacaggtaccgagctcgaattcactggccgtcgttttacaacgtcgtgactgggaaaaccctggcgttacccaacttaatcgccttgccattttttaaccaataggccgtactgcgatgagtggcagggcggggcgtaatttttttaaggcagttattggtgcccttaaacgcctggttgctacgcctgaataagtgataataagcggatgaatggcagaaattcgaaagcaaattcgacccggtcgtcggttcagggcagggtcgttaaatagccgcttatgtctattgctggtttaccggtttattgactaccggaagcagtgtgaccgtgtgcttctcaaatgcctgaggccagtttgctcaggctctccccgtggaggtaataattgacgatatgatcatttattctgcctcccagagcctgataaaaacggtgaatccgttagcgaggtgccgccggcttccattcaggtcgaggtggcccggctccatgcaccgcgacgcaacgcggggaggcagacaaggtatagggcggcgaggcggctacagccgatagtctggaacagcgcacttacgggttgctgcgcaacccaagtgctaccggcgcggcagcgtgacccgtgtcggcggctccaacggctcgccatcgtccagaaaacacggctcatcgggcatcggcaggcgctgctgcccgcgccgttcccattcctccgtttcggtcaaggctggcaggtctggttccatgcccggaatgccgggctggctgggcggctcctcgccggggccggtcggtagttgctgctcgcccggatacagggtcgggatgcggcgcaggtcgccatgccccaacagcgattcgtcctggtcgtcgtgatcaaccaccacggcggcactgaacaccgacaggcgcaactggtcgcggggctggccccacgccacgcggtcattgaccacgtaggccgacacggtgccggggccgttgagcttcacgacggagatccagcgctcggccaccaagtccttgactgcgtattggaccgtccgcaaagaacgtccgatgagcttggaaagtgtcttctggctgaccaccacggcgttctggtggcccatctgcgccacgaggtgatgcagcagcattgccgccgtgggtttcctcgcaataagcccggcccacgcctcatgcgctttgcgttccgtttgcacccagtgaccgggcttgttcttggcttgaatgccgatttctctggactgcgtggccatgcttatctccatgcggtaggggtgccgcacggttgcggcaccatgcgcaatcagctgcaacttttcggcagcgcgacaacaattatgcgttgcgtaaaagtggcagtcaattacagattttctttaacctacgcaatgagctattgcggggggtgccgcaatgagctgttgcgtaccccccttttttaagttgttgatttttaagtctttcgcatttcgccctatatctagttctttggtgcccaaagaagggcacccctgcggggttcccccacgccttcggcgcggctccccctccggcaaaaagtggcccctccggggcttgttgatcgactgcgcggccttcggccttgcccaaggtggcgctgcccccttggaacccccgcactcgccgccgtgaggctcggggggcaggcgggcgggcttcgcccttcgactgcccccactcgcataggcttgggtcgttccaggcgcgtcaaggccaagccgctgcgcggtcgctgcgcgagccttgacccgccttccacttggtgtccaaccggcaagcgaagcgcgcaggccgcaggccggaggcttttccccagagaaaattaaaaaaattgatggggcaaggccgcaggccgcgcagttggagccggtgggtatgtggtcgaaggctgggtagccggtgggcaatccctgtggtcaagctcgtgggcaggcgcagcctgtccatcagcttgtccagcagggttgtccacgggccgagcgaagcgagccagccggtggccgctcgcggccatcgtccacatatccacgggctggcaagggagcgcagcgaccgcgcagggcgaagcccggagagcaagcccgtagggcgccgcagccgccgtaggcggtcacgactttgcgaagcaaagtctagtgagtatactcaagcattgagtggcccgccggaggcaccgccttgcgctgcccccgtcgagccggttggacaccaaaagggaggggcaggcatggcggcatacgcgatcatgcgatgcaagaagctggcgaaaatgggcaacgtggcggccagtctcaagcacgcctaccgcgagcgcgagacgcccaacgctgacgccagcaggacgccagagaacgagcactgggcggccagcagcaccgatgaagcgatgggccgactgcgcgagttgctgccagagaagcggcgcaaggacgctgtgttggcggtcgagtacgtcatgacggccagcccggaatggtggaagtcggccagccaagaacagcaggcggcgttcttcgagaaggcgcacaagtggctggcggacaagtacggggcggatcgcatcgtgacggccagcatccaccgtgacgaaaccagcccgcacatgaccgcgttcgtggtgccgctgacgcaggacggcaggctgtcggccaaggagttcatcggcaacaaagcgcagatgacccgcgaccagaccacgtttgcggccgctgtggccgatctagggctgcaacggggcatcgagggcagcaaggcacgtcacacgcgcattcaggcgttctacgaggccctggagcggccaccagtgggccacgtcaccatcagcccgcaagcggtcgagccacgcgcctatgcaccgcagggattggccgaaaagctgggaatctcaaagcgcgttgagacgccggaagccgtggccgaccggctgacaaaagcggttcggcaggggtatgagcctgccctacaggccgccgcaggagcgcgtgagatgcgcaagaaggccgatcaagcccaagagacggcccgagaccttcgggagcgcctgaagcccgttctggacgccctggggccgttgaatcgggatatgcaggccaaggccgccgcgatcatcaaggccgtgggcgaaaagctgctgacggaacagcgggaagtccagcgccagaaacaggcccagcgccagcaggaacgcgggcgcgcacatttccccgaaaagtgccacctgggatgaatgtcagctactgggctatctggacaagggaaaacgcaagcgcaaagagaaagcaggtagcttgcagtgggcttacatggcgatagctagactgggcggttttatggacagcaagcgaaccggaattgccagctggggcgccctctggtaaggttgggaagccctgcaaagtaaactggatggctttcttgccgccaaggatctgatggcgcaggggatcaagatctgatcaagagacaggatgaggatcgtttcgcatgattgaacaagatggattgcacgcaggttctccggccgcttgggtggagaggctattcggctatgactggg

SEQ ID NO: 26 - DNA, 14340 bp, artificial sequence
  Synthetic
cacaacagacaatcggctgctctgatgccgccgtgttccggctgtcagcgcaggggcgcccggttctttttgtcaagaccgacctgtccggtgccctgaatgaactgcaagacgaggcagcgcggctatcgtggctggccacgacgggcgttccttgcgcagctgtgctcgacgttgtcactgaagcgggaagggactggctgctattgggcgaagtgccggggcaggatctcctgtcatctcaccttgctcctgccgagaaagtatccatcatggctgatgcaatgcggcggctgcatacgcttgatccggctacctgcccattcgaccaccaagcgaaacatcgcatcgagcgagcacgtactcggatggaagccggtcttgtcgatcaggatgatctggacgaagagcatcaggggctcgcgccagccgaactgttcgccaggctcaaggcgcgcatgcccgacggcgaggatctcgtcgtgacccatggcgatgcctgcttgccgaatatcatggtggaaaatggccgcttttctggattcatcgactgtggccggctgggtgtggcggaccgctatcaggacatagcgttggctacccgtgatattgctgaagagcttggcggcgaatgggctgaccgcttcctcgtgctttacggtatcgccgctcccgattcgcagcgcatcgccttctatcgccttcttgacgagttcttctgagcgggactctggggttcgaaatgaccgaccaagcgacgcccaacctgccatcacgagatttcgattccaccgccgccttctatgaaaggttgggcttcggaatcgttttccgggacgccggctggatgatcctccagcgcggggatctcatgctggagttcttcgcccacccccatgggcaaatattatacgcaaggcgacaaggtgctgatgccgctggcgattcaggttcatcatgccgtttgtgatggcttccatgtcggcagaatgcttaatgaattacaacagtttttatgcatgcgcccaatacgcaaaccgcctctccccgcgcgttggccgattcattaatgcagctggcacgacaggtttcccgactggtggataaccgtattaccgcctttgagtgagctgataccgctcgccgcagccgaactaccgagcgcagcgagtcagtgagcgaggagcgactcctgcattaggaaattaatacgactcactataggggaattgtgagcggataacaattcccctgtagaaataattttgtttaactttaataaggagatataccatgggtgaactgccgagtaggtagctgataactcttgctgagattgataaggtaattaaccttagtgaactgccgagtaggtagctgataacggatccgaattcgagcgaaggagatatacatatgtttttgcaaagacctaaaccttacagcgatgaaagtttagaaagtttctttatccgagtggctaacaaaaatggctacggtgatgtccatcgcttcctagaagccactaaacgattccttcaagacattgaccataatggctatcaaacctttccgactgatataactcggataaacccatactcagctaaaaacagttccagcgcacgaactgcgtcattcctgaaacttgcacaattgacatttaatgaaccgccagagctacttgggttggcaattaacagaacaaacatgaaatactcgccgtcaactagcgcggttgttagaggtgcagaagtctttcctcgcagtttactacggacgcactccatcccctgctgtcctttgtgtctgcgagaaaatggctacgcctcctacctttggcactttcaggggtacgaatactgccacagccataacgtacctttaattaccacttgtagctgtggtaaggagtttgactaccgagtatctgggttaaagggcatttgctgcaaatgcaaggagcctatcaccttaaccagcagggagaacggtcatgaggcagcgtgtactgtttcaaactggcttgctggccatgaatctaaacctctgccaaatcttcctaaaagctaccgatggggtttagttcattggtggatgggtattaaagatagcgagttcgatcacttttcgttcgttcaatttttctcaaactggccaaggtcattccactcgataatcgaagatgaagtagagttcaaccttgagcatgctgttgtcagcacgtctgaattacgactaaaagatcttcttggtcgattgtttttcggttcaattcggttacctgagcggaatcttcaacacaatatcatccttggtgagcttctctgctatttagaaaatcgtttatggcaagacaagggattaatcgccaacctcaaaatgaacgcgttagaggcgactgtaatgttaaattgtagcctcgatcagattgcatcaatggttgaacaacgcatcttgaagccaaatcgaaaaagcaagcccaacagccctcttgatgttaccgattatctatttcatttcggcgatattttctgtctttggttagctgagttccaaagcgatgagtttaaccgttcgttttatgtgtcgaggtggtaaatgcaaactctgaaagaactaatcgcatccaatcctgacgacttaacaactgaacttaagagagcatttcgtccactcacaccgcatattgcaattgatggtaatgaacttgacgcactgacgatattagtcaatttaaccgataagactgatgatcagaaagacctgctcgatcgagccaaatgcaagcaaaaacttcgagatgaaaaatggtgggctagctgcataaattgcgttaattacagacaaagccataacccaaaattcccggatatacgttctgaaggcgtgattcgaacccaagccctgggtgaattaccgagtttcctactctcgtcctcaaaaatcccaccataccattggtcatatagccatgattcaaaatacgtcaacaaaagcgcattcctcaccaatgagttttgttgggatggtgagatctcatgtttgggtgagcttcttaaagatgcagatcacccactttggaatactttgaaaaagttaggttgttctcaaaaaacttgcaaagcaatggcaaaacaactagctgatattactctcacgactatcaatgtcacactcgcaccaaattacctgactcaaatatctctccccgatagtgatacatcctacatttcactctctcctgttgcatcgctatcgatgcaaagccactttcatcagaggctccaagatgaaaatcggcatagcgcgataacgcggtttagccgaactaccaacatgggggtcactgcgatgacatgtggcggcgcatttagaatgttaaagtctggcgctaagttttccagcccccctcatcaccgattaaacagtaaacgaagttggttgacgtcagagcatgttcagtcattaaaacagtaccagcgcctcaacaaaagcctcatacctgaaaactctcggattgcactccgtagaaaatacaaaatcgagcttcaaaatatggtcagatcttggtttgcaatgcaagaccatacccttgattcgaacatacttatccaacatttgaatcatgacctatcttacttaggagccacaaaacgttttgcatacgatccagcgatgaccaagctctttactgagcttttgaaacgagagttatcaaattcaatcaataatggtgagcaacacactaatggatcgtttttagtcctaccgaatatcagggtttgtggcgcaacagctttaagctccccggtaacggtggggattccatcacttacagctttctttggcttcgttcacgcatttgaacggaatataaatcgcaccacctcatcgtttcgtgttgaatcctttgcgatatgcgtccatcaactacatgtcgagaagcgaggtttgacagcagagtttgtggaaaaaggcgacgggactatatccgctcccgcgacccgggatgactggcagtgtgatgtcgtatttagccttattttgaacaccaactttgctcaacatattgaccaagatacgttagttacatcactaccaaagcgattggctcggggttcagcaaaaattgcgattgatgactttaaacatatcaactcattctcgacattagaaacagcgatcgaatctctgccaatagaagctggtaggtggttatcactttacgcacagtcaaacaataatctaagtgatctattagcagccatgacagaggaccatcagctcatggcaagctgcgtcggttaccacttgttagaagagcccaaagataaaccaaactccctcagaggttacaaacacgctatcgccgagtgcatcattggactcattaactcaatcacctttagctcagagactgatcccaacacaatcttttggtcgctaaagaactatcaaaactacctagtggtacagccaaggagtatcaacgatgaaactaccgacaaatctagcctatgagcgctctatcgacccatcagatgtctgtttttttgtcgtctggcccgatgatagaaaaacacctttaacctacaattctcgtactctgctcgggcaaatggaagcggcatcattagcctatgatgtctcaggtcaaccaataaaaagtgccaccgctgaggcgttagctcaagggaaccctcatcaagttgatttctgccacgttccatacggtgcgagtcatattgaatgcagtttctccgtctcgttttcttctgaactacgtcaaccatataagtgtaactcaagcaaagttaaacaaacgctagtgcaattagtcgagctctacgaaacgaaaatcggctggactgagctagcaacccgatatttgatgaacatttgcaacggtaaatggctgtggaaaaatacccgtaaagcctattgctggaacattgtacttacaccttggccttggaacggggaaaaggttggatttgaagatattcgtactaactacacctcacggcaagactttaaaaataataaaaattggtctgctatagttgaaatgatcaaaaccgcattttctagtactgatgggctggcgatatttgaagtcagggccaccttgcacttgccaacgaatgctatggtgcggccaagccaagttttcacagaaaaagaaagtggcagtaaaagtaaatctaaaactcaaaacagtcgagtttttcagagtacaactattgatggtgaacgatcgccaatactaggggcctttaaaacgggagcagctattgcaaccattgacgactggtatcctgaagccactgagccactaagggtcggacggtttggggttcatcgcgaagatgtcacttgctaccgtcatccgtctaccggaaaagattttttctcgatattacaacaagcagagcactatattgaagtgttgagcgccaacaaaactcccgctcaagaaactatcaacgacatgcactttttaatggctaacctgattaagggtgggatgttccagcataaaggagactgactgtgaaatggtattataagacaatcacctttctgccagagttgtgcaacaacgagtcactggctgcaaagtgtctccgcgttctgcatggatttaactatcagtatgagacacgaaatatcggcgtttcatttccgctttggtgtgatgcaacggttggaaaaaagatttcatttgtcagcaagaacaagatagaactcgacttactacttaaacaacactatttcgtccaaatggaacaacttcaatactttcatatatccaacactgttctcgtcccagaagattgtacatacgtttcctttagacgctgtcaatctatagataagctcacagcagcagggctggcaaggaaaatcagacgcctggagaaacgtgctctatctagaggcgagcaatttgacccatcatcttttgctcaaaaagagcatactgcaatagcgcactaccactcacttggggagtccagcaaacagacgaaccgcaactttcgactcaatatcaggatgctctcggagcaaccccgtgaggggaactcgatttttagtagctatggcttatcaaattcagaaaactcgtttcagcctgtacccttaatctgacctttaataaggagatataccatggcgacaagtttacctacgccctcagcaattacgacttcggcgttagagtatgcattccatactcccgctcgcaatctaacgaaatctcgcggaaaaaacattcatcgttatgtcagtgtaaagatgagtaagaggattacggtagaatctactctagagtgtgatgcctgctatcactttgattttgagccaagtattgttcgcttttgcgctcaaccgattcgatttttatattatctcaatggtcagtctcactcctatgttcctgactttctagttcaatttgataccaacgagtttgttctatatgaagtaaagtcagcttatgctaagaacaaacctgattttgatgttgaatgggaggcgaaagtaaaagcagcaactgaactagggctagaattggagcttgttgaagagagtgatattagggatacggttgtattaaataatcttaagcgcatgcatcgttatgcttcgaaagatgagctgaataacgtacataactctctcttaaaaataataaagtacaatggcgcccaatctgcaagatgcttgggagaacagttgggtttaaaaggccgaactgttttaccaattttgtgcgatttgctgtcaaggtgtttactcgatacacgtttggataagcctctatctcttgaatctcgatttgagttggccagttatggctaagaaagggttctcaagtttccatagaaaagcagtctcttcccaagatacgcttgaatcgatagagcttgtctctagcgctaattgtctagaaagtgttacgtatcaagatatatcagcatttcccgaaacaattgcggtagagattaatttccgattaagcattcttcgctttttagcgcgaaagtgcgaaaccattgtggccaaatcaattgaaccacatcgtgtagagctacagcaaaactatagtagaaaaatacccagtgcaataacgatatatcgatggtggcttgcttttcgaaaatcagactacaaccccattagcttagcacctaatatcaaggatagaggtaatagagagacaaaagtgtcaacagttgttgattctattatggaacaggcagttgaaagagttatatctggacgaaaagtcaatgttagctctgcatataaacgtgttcgacgaaaagttcgtcaatacaatctaactcatggaacgaaatacacgtatcctaagtacgaatctgtaagaaagcgagtaaaaaagaaaaccccatttgagttattagccgcagggaaaggggagagagtagctaagagagagtttcgccgaatgggaaaaaagatcctcacgtctagcgtgctagagagggttgaaatagatcacactgtcgttgacctttttgcagtacacgaagagtatcgaatcccattgggccgaccttggcttactcaattggttgattgttacagtaaagctgtaatcggtttttatttaggtttcgagcctcctagctatgtgtcggtttcccttgcacttaagaatgcaatacaacgcaaagatgacttaatctcctcgtatgaatcgatcgagaatgaatggctatgttatggcatcccagacctactcgtaactgataatggtaaagagtttttgtcgaaagcatttgatcaagcatgtgaatcactattgatcaatgtgcatcaaaataaagttgagacgcccgacaacaaacctcatgttgaacgtaactacgggactattaatacttctctgttagacgatttacctgggaaatccttcagccagtaccttcaaagagaagggtacgactctgtgggagaagctacccttacactcaatgagattagagaaatttacttaatttggttggtggatatttatcataaaaaacccaatcagagaggcactaattgtcctaatgttgcgtggaaaaagggttgtcaagaatgggaaccagaggagttctctggttctaaagacgaattagactttaaatttgctattgttgattacaaacaacttactaaagtagggataactgtctacaaagaactgagttatagcaatgaccgtttagctgaatatagagggaagaaaggaaaccataaagttcagttcaagtataaccctgagtgtatggcagttatttgggtgttggatgaggatatgaatgagtactttacagttaatgcgattgactacgaatatgcaagtagagtatcactttggcaacataaatataacatgaaatatcaagcagaactaaattcagcagaatatgatgaggacaaggaaattgatgcagaaataaaaattgaagaaatcgcagatcgttcaattgttaagactaacaaaatcagagctcggaggcgtggcgctaggcatcaagagaatagcgcaagggctaagtcaatcagtaatgcgaacccggcctcgatacaaaaacatgaagatgaaatcgttagtgcagataatgacgattgggatattgattatgtctgagaaatcgtcaaatgagtgaaacgcgtgaggctcgtatatcaagagctaaaagggcatttgtatccacaccgagcgttaggaaaatcttgagttacatggatagatgtagagatctatcagacctagagtctgagcctacatgcatgatggtctatggtgcttcgggtgtaggtaaaacgaccgtcatcaagaaatacttaaatcaaaacagaagagagtccgaagccgggggcgatataataccggttttgcatattgagttgccagacaatgcgaagccagtagatgcagcaagggaattgctggttgaaatgggtgacccgctagcactttatgaaactgacttagctagattgacgaaaagactgactgaattaatccctgcggtcggcgtgaagctgattattatcgatgagttccaacatttggtggaagaaaggtcaaatcgggttcttacccaagtaggtaattggctaaaaatgatacttaacaaaacgaaatgtccaattgttatatttggtatgccatactcaaaagttgtactgcaagcaaactcgcaacttcacgggcgattttccattcaggttgaactgcgcccctttagctaccagggaggtagaggtgtatttaaaacttttttggaataccttgataaagccctaccttttgaaaaacaggctggcttagccaacgaaagtttgcagaaaaaattgtatgcattctctcagggaaacatgcgttcgttgagaaaccttatttatcaagcatctatcgaagcaattgataatcagcatgagacgataaccgaagaagatttcgtttttgcatcgaagttgacatcgggcgataaacccaactcatggaaaaatccttttgaggagggtgttgaggtaacagaagatatgttacgaccgccaccaaaagatattggttgggaggactatttgagacattcaaccccgagagtgagtaaaccaggtagaaataaaaactttttcgaataacctaggctgctgcgctgctgccaccgctgagcaataactagcataaccccttggggcctctaaacgggtcttgaggggttttttgctgaaacctcaggcatttgttgttgatacaaccataaaatgataattacacccataaattgataattatcacacccataaattgatattgcctcttcatggtctaaacttcagtaagtttacgacattttcctcgaggtcatttccggggatccatggagaaaaaaatcactggatataccaccgttgatatatcccaatggcatcgtaaagaacattttgaggcatttcagtcagttgctcaatgtacctataaccagaccgttcagctggatattacggcctttttaaagaccgtaaagaaaaataagcacaagttttatccggcctttattcacattcttgcccgcctgatgaatgctcatccggagttccgtatggcaatgaaagacggtgagctggtgatatgggatagtgttcacccttgttacaccgttttccatgagcaaactgaaacgttttcatcgctctggagtgaataccacgacgatttccggcagtttctacacatatattcgcaagatgtggcgtgttacggtgaaaacctggcctatttccctaaagggtttattgagaatatgtttttcgtctcagccaatccctgggtgagtttcaccagttttgatttaaacgtggccaatatggacaacttcttcgcccccgttttcactatgggcaaatattatacgcaaggcgacaaggtgctgatgccgctggcgattcaggttcatcatgccgtttgtgatggcttccatgtcggcagaatgcttaatgaattacaacagtactgcgatgagtggcagggcggggcgtaatttttttaaggcagttattggtgcccttctagagtccttactgcagtagttttgctgaaatactcgattcacaaaaatatcaacttatggttgttttgtgagatatcaatatatggttgttttgtggttaagttgctgattataaataattattaaatatcactttatggttgcatcaacaggtaccgagctcgaattcactggccgtcgttttacaacgtcgtgactgggaaaaccctggcgttacccaacttaatcgccttgccattttttaaccaataggccgtactgcgatgagtggcagggcggggcgtaatttttttaaggcagttattggtgcccttaaacgcctggttgctacgcctgaataagtgataataagcggatgaatggcagaaattcgaaagcaaattcgacccggtcgtcggttcagggcagggtcgttaaatagccgcttatgtctattgctggtttaccggtttattgactaccggaagcagtgtgaccgtgtgcttctcaaatgcctgaggccagtttgctcaggctctccccgtggaggtaataattgacgatatgatcatttattctgcctcccagagcctgataaaaacggtgaatccgttagcgaggtgccgccggcttccattcaggtcgaggtggcccggctccatgcaccgcgacgcaacgcggggaggcagacaaggtatagggcggcgaggcggctacagccgatagtctggaacagcgcacttacgggttgctgcgcaacccaagtgctaccggcgcggcagcgtgacccgtgtcggcggctccaacggctcgccatcgtccagaaaacacggctcatcgggcatcggcaggcgctgctgcccgcgccgttcccattcctccgtttcggtcaaggctggcaggtctggttccatgcccggaatgccgggctggctgggcggctcctcgccggggccggtcggtagttgctgctcgcccggatacagggtcgggatgcggcgcaggtcgccatgccccaacagcgattcgtcctggtcgtcgtgatcaaccaccacggcggcactgaacaccgacaggcgcaactggtcgcggggctggccccacgccacgcggtcattgaccacgtaggccgacacggtgccggggccgttgagcttcacgacggagatccagcgctcggccaccaagtccttgactgcgtattggaccgtccgcaaagaacgtccgatgagcttggaaagtgtcttctggctgaccaccacggcgttctggtggcccatctgcgccacgaggtgatgcagcagcattgccgccgtgggtttcctcgcaataagcccggcccacgcctcatgcgctttgcgttccgtttgcacccagtgaccgggcttgttcttggcttgaatgccgatttctctggactgcgtggccatgcttatctccatgcggtaggggtgccgcacggttgcggcaccatgcgcaatcagctgcaacttttcggcagcgcgacaacaattatgcgttgcgtaaaagtggcagtcaattacagattttctttaacctacgcaatgagctattgcggggggtgccgcaatgagctgttgcgtaccccccttttttaagttgttgatttttaagtctttcgcatttcgccctatatctagttctttggtgcccaaagaagggcacccctgcggggttcccccacgccttcggcgcggctccccctccggcaaaaagtggcccctccggggcttgttgatcgactgcgcggccttcggccttgcccaaggtggcgctgcccccttggaacccccgcactcgccgccgtgaggctcggggggcaggcgggcgggcttcgcccttcgactgcccccactcgcataggcttgggtcgttccaggcgcgtcaaggccaagccgctgcgcggtcgctgcgcgagccttgacccgccttccacttggtgtccaaccggcaagcgaagcgcgcaggccgcaggccggaggcttttccccagagaaaattaaaaaaattgatggggcaaggccgcaggccgcgcagttggagccggtgggtatgtggtcgaaggctgggtagccggtgggcaatccctgtggtcaagctcgtgggcaggcgcagcctgtccatcagcttgtccagcagggttgtccacgggccgagcgaagcgagccagccggtggccgctcgcggccatcgtccacatatccacgggctggcaagggagcgcagcgaccgcgcagggcgaagcccggagagcaagcccgtagggcgccgcagccgccgtaggcggtcacgactttgcgaagcaaagtctagtgagtatactcaagcattgagtggcccgccggaggcaccgccttgcgctgcccccgtcgagccggttggacaccaaaagggaggggcaggcatggcggcatacgcgatcatgcgatgcaagaagctggcgaaaatgggcaacgtggcggccagtctcaagcacgcctaccgcgagcgcgagacgcccaacgctgacgccagcaggacgccagagaacgagcactgggcggccagcagcaccgatgaagcgatgggccgactgcgcgagttgctgccagagaagcggcgcaaggacgctgtgttggcggtcgagtacgtcatgacggccagcccggaatggtggaagtcggccagccaagaacagcaggcggcgttcttcgagaaggcgcacaagtggctggcggacaagtacggggcggatcgcatcgtgacggccagcatccaccgtgacgaaaccagcccgcacatgaccgcgttcgtggtgccgctgacgcaggacggcaggctgtcggccaaggagttcatcggcaacaaagcgcagatgacccgcgaccagaccacgtttgcggccgctgtggccgatctagggctgcaacggggcatcgagggcagcaaggcacgtcacacgcgcattcaggcgttctacgaggccctggagcggccaccagtgggccacgtcaccatcagcccgcaagcggtcgagccacgcgcctatgcaccgcagggattggccgaaaagctgggaatctcaaagcgcgttgagacgccggaagccgtggccgaccggctgacaaaagcggttcggcaggggtatgagcctgccctacaggccgccgcaggagcgcgtgagatgcgcaagaaggccgatcaagcccaagagacggcccgagaccttcgggagcgcctgaagcccgttctggacgccctggggccgttgaatcgggatatgcaggccaaggccgccgcgatcatcaaggccgtgggcgaaaagctgctgacggaacagcgggaagtccagcgccagaaacaggcccagcgccagcaggaacgcgggcgcgcacatttccccgaaaagtgccacctgggatgaatgtcagctactgggctatctggacaagggaaaacgcaagcgcaaagagaaagcaggtagcttgcagtgggcttacatggcgatagctagactgggcggttttatggacagcaagcgaaccggaattgccagctggggcgccctctggtaaggttgggaagccctgcaaagtaaactggatggctttcttgccgccaaggatctgatggcgcaggggatcaagatctgatcaagagacaggatgaggatcgtttcgcatgattgaacaagatggattgcacgcaggttctccggccgcttgggtggagaggctattcggctatgactggg

SEQ ID NO: 27 - DNA, 12828 bp, artificial sequence
  Synthetic
gcgctgcggacacatacaaagttacccacagattccgtggataagcaggggactaacatgtgaggcaaaacagcagggccgcgccggtggcgtttttccataggctccgccctcctgccagagttcacataaacagacgcttttccggtgcatctgtgggagccgtgaggctcaaccatgaatctgacagtacgggcgaaacccgacaggacttaaagatccccaccgtttccggcgggtcgctccctcttgcgctctcctgttccgaccctgccgtttaccggatacctgttccgcctttctcccttacgggaagtgtggcgctttctcatagctcacacactggtatctcggctcggtgtaggtcgttcgctccaagctgggctgtaagcaagaactccccgttcagcccgactgctgcgccttatccggtaactgttcacttgagtccaacccggaaaagcacggtaaaacgccactggcagcagccattggtaactgggagttcgcagaggatttgtttagctaaacacgcggttgctcttgaagtgtgcgccaaagtccggctacactggaaggacagatttggttgctgtgctctgcgaaagccagttaccacggttaagcagttccccaactgacttaaccttcgatcaaaccacctccccaggtggttttttcgtttacagggcaaaagattacgcgcagaaaaaaaggatctcaagaagatcctttgatcttttctactgaaccgctctagatttcagtgcaatttatctcttcaaatgtagcacctgaagtcagccccatacgatataagttgtaattctcatgttagtcatgccccgcgcccaccggaaggagctgactgggttgaaggctctcaagggcatcggtcgagatcccggtgcctaatgagtgagctaacttacattaattgcgttgcgctcactgcccgctttccagtcgggaaacctgtcgtgccagctgcattaatgaatcggccaacgcgcggggagaggcggtttgcgtattgggcgccagggtggtttttcttttcaccagtgagacgggcaacagctgattgcccttcaccgcctggccctgagagagttgcagcaagcggtccacgctggtttgccccagcaggcgaaaatcctgtttgatggtggttaacggcgggatataacatgagctgtcttcggtatcgtcgtatcccactaccgagatgtccgcaccaacgcgcagcccggactcggtaatggcgcgcattgcgcccagcgccatctgatcgttggcaaccagcatcgcagtgggaacgatgccctcattcagcatttgcatggtttgttgaaaaccggacatggcactccagtcgccttcccgttccgctatcggctgaatttgattgcgagtgagatatttatgccagccagccagacgcagacgcgccgagacagaacttaatgggcccgctaacagcgcgatttgctggtgacccaatgcgaccagatgctccacgcccagtcgcgtaccgtcttcatgggagaaaataatactgttgatgggtgtctggtcagagacatcaagaaataacgccggaacattagtgcaggcagcttccacagcaatggcatcctggtcatccagcggatagttaatgatcagcccactgacgcgttgcgcgagaagattgtgcaccgccgctttacaggcttcgacgccgcttcgttctaccatcgacaccaccacgctggcacccagttgatcggcgcgagatttaatcgccgcgacaatttgcgacggcgcgtgcagggccagactggaggtggcaacgccaatcagcaacgactgtttgcccgccagttgttgtgccacgcggttgggaatgtaattcagctccgccatcgccgcttccactttttcccgcgttttcgcagaaacgtggctggcctggttcaccacgcgggaaacggtctgataagagacaccggcatactctgcgacatcgtataacgttactggtttcacattcaccaccctgaattgactctcttccgggcgctatcatgccataccgcgaaaggttttgcgccattcgatggtgtccgggatctcgacgctctcccttatgcgactcctgcattaggaatggataaccgtattaccgcctttgagtgagctgataccgctcgccgcagccgaacgaccgagcgcagcgagtcagtgagcgaggacacaagctttgacagctagctcagtcctaggtataatactagcgtcgacgtggagatataccatgggtgaactgccgagtaggtagctgataacgagacctctgtcttgtcagctagggtggtctcgtgaactgccgagtaggtagctgataacggatccgaattcgagcgaaggagatatacatatgtttttgcaaagacctaaaccttacagcgatgaaagtttagaaagtttctttatccgagtggctaacaaaaatggctacggtgatgtccatcgcttcctagaagccactaaacgattccttcaagacattgaccataatggctatcaaacctttccgactgatataactcggataaacccatactcagctaaaaacagttccagcgcacgaactgcgtcattcctgaaacttgcacaattgacatttaatgaaccgccagagctacttgggttggcaattaacagaacaaacatgaaatactcgccgtcaactagcgcggttgttagaggtgcagaagtctttcctcgcagtttactacggacgcactccatcccctgctgtcctttgtgtctgcgagaaaatggctacgcctcctacctttggcactttcaggggtacgaatactgccacagccataacgtacctttaattaccacttgtagctgtggtaaggagtttgactaccgagtatctgggttaaagggcatttgctgcaaatgcaaggagcctatcaccttaaccagcagggagaacggtcatgaggcagcgtgtactgtttcaaactggcttgctggccatgaatctaaacctctgccaaatcttcctaaaagctaccgatggggtttagttcattggtggatgggtattaaagatagcgagttcgatcacttttcgttcgttcaatttttctcaaactggccaaggtcattccactcgataatcgaagatgaagtagagttcaaccttgagcatgctgttgtcagcacgtctgaattacgactaaaagatcttcttggtcgattgtttttcggttcaattcggttacctgagcggaatcttcaacacaatatcatccttggtgagcttctctgctatttagaaaatcgtttatggcaagacaagggattaatcgccaacctcaaaatgaacgcgttagaggcgactgtaatgttaaattgtagcctcgatcagattgcatcaatggttgaacaacgcatcttgaagccaaatcgaaaaagcaagcccaacagccctcttgatgttaccgattatctatttcatttcggcgatattttctgtctttggttagctgagttccaaagcgatgagtttaaccgttcgttttatgtgtcgaggtggtaaatgcaaactctgaaagaactaatcgcatccaatcctgacgacttaacaactgaacttaagagagcatttcgtccactcacaccgcatattgcaattgatggtaatgaacttgacgcactgacgatattagtcaatttaaccgataagactgatgatcagaaagacctgctcgatcgagccaaatgcaagcaaaaacttcgagatgaaaaatggtgggctagctgcataaattgcgttaattacagacaaagccataacccaaaattcccggatatacgttctgaaggcgtgattcgaacccaagccctgggtgaattaccgagtttcctactctcgtcctcaaaaatcccaccataccattggtcatatagccatgattcaaaatacgtcaacaaaagcgcattcctcaccaatgagttttgttgggatggtgagatctcatgtttgggtgagcttcttaaagatgcagatcacccactttggaatactttgaaaaagttaggttgttctcaaaaaacttgcaaagcaatggcaaaacaactagctgatattactctcacgactatcaatgtcacactcgcaccaaattacctgactcaaatatctctccccgatagtgatacatcctacatttcactctctcctgttgcatcgctatcgatgcaaagccactttcatcagaggctccaagatgaaaatcggcatagcgcgataacgcggtttagccgaactaccaacatgggggtcactgcgatgacatgtggcggcgcatttagaatgttaaagtctggcgctaagttttccagcccccctcatcaccgattaaacagtaaacgaagttggttgacgtcagagcatgttcagtcattaaaacagtaccagcgcctcaacaaaagcctcatacctgaaaactctcggattgcactccgtagaaaatacaaaatcgagcttcaaaatatggtcagatcttggtttgcaatgcaagaccatacccttgattcgaacatacttatccaacatttgaatcatgacctatcttacttaggagccacaaaacgttttgcatacgatccagcgatgaccaagctctttactgagcttttgaaacgagagttatcaaattcaatcaataatggtgagcaacacactaatggatcgtttttagtcctaccgaatatcagggtttgtggcgcaacagctttaagctccccggtaacggtggggattccatcacttacagctttctttggcttcgttcacgcatttgaacggaatataaatcgcaccacctcatcgtttcgtgttgaatcctttgcgatatgcgtccatcaactacatgtcgagaagcgaggtttgacagcagagtttgtggaaaaaggcgacgggactatatccgctcccgcgacccgggatgactggcagtgtgatgtcgtatttagccttattttgaacaccaactttgctcaacatattgaccaagatacgttagttacatcactaccaaagcgattggctcggggttcagcaaaaattgcgattgatgactttaaacatatcaactcattctcgacattagaaacagcgatcgaatctctgccaatagaagctggtaggtggttatcactttacgcacagtcaaacaataatctaagtgatctattagcagccatgacagaggaccatcagctcatggcaagctgcgtcggttaccacttgttagaagagcccaaagataaaccaaactccctcagaggttacaaacacgctatcgccgagtgcatcattggactcattaactcaatcacctttagctcagagactgatcccaacacaatcttttggtcgctaaagaactatcaaaactacctagtggtacagccaaggagtatcaacgatgaaactaccgacaaatctagcctatgagcgctctatcgacccatcagatgtctgtttttttgtcgtctggcccgatgatagaaaaacacctttaacctacaattctcgtactctgctcgggcaaatggaagcggcatcattagcctatgatgtctcaggtcaaccaataaaaagtgccaccgctgaggcgttagctcaagggaaccctcatcaagttgatttctgccacgttccatacggtgcgagtcatattgaatgcagtttctccgtctcgttttcttctgaactacgtcaaccatataagtgtaactcaagcaaagttaaacaaacgctagtgcaattagtcgagctctacgaaacgaaaatcggctggactgagctagcaacccgatatttgatgaacatttgcaacggtaaatggctgtggaaaaatacccgtaaagcctattgctggaacattgtacttacaccttggccttggaacggggaaaaggttggatttgaagatattcgtactaactacacctcacggcaagactttaaaaataataaaaattggtctgctatagttgaaatgatcaaaaccgcattttctagtactgatgggctggcgatatttgaagtcagggccaccttgcacttgccaacgaatgctatggtgcggccaagccaagttttcacagaaaaagaaagtggcagtaaaagtaaatctaaaactcaaaacagtcgagtttttcagagtacaactattgatggtgaacgatcgccaatactaggggcctttaaaacgggagcagctattgcaaccattgacgactggtatcctgaagccactgagccactaagggtcggacggtttggggttcatcgcgaagatgtcacttgctaccgtcatccgtctaccggaaaagattttttctcgatattacaacaagcagagcactatattgaagtgttgagcgccaacaaaactcccgctcaagaaactatcaacgacatgcactttttaatggctaacctgattaagggtgggatgttccagcataaaggagactgactgtgaaatggtattataagacaatcacctttctgccagagttgtgcaacaacgagtcactggctgcaaagtgtctccgcgttctgcatggatttaactatcagtatgagacacgaaatatcggcgtttcatttccgctttggtgtgatgcaacggttggaaaaaagatttcatttgtcagcaagaacaagatagaactcgacttactacttaaacaacactatttcgtccaaatggaacaacttcaatactttcatatatccaacactgttctcgtcccagaagattgtacatacgtttcctttagacgctgtcaatctatagataagctcacagcagcagggctggcaaggaaaatcagacgcctggagaaacgtgctctatctagaggcgagcaatttgacccatcatcttttgctcaaaaagagcatactgcaatagcgcactaccactcacttggggagtccagcaaacagacgaaccgcaactttcgactcaatatcaggatgctctcggagcaaccccgtgaggggaactcgatttttagtagctatggcttatcaaattcagaaaactcgtttcagcctgtacccttaatctgacctttaataaggagatataccatggcgacaagtttacctacgccctcagcaattacgacttcggcgttagagtatgcattccatactcccgctcgcaatctaacgaaatctcgcggaaaaaacattcatcgttatgtcagtgtaaagatgagtaagaggattacggtagaatctactctagagtgtgatgcctgctatcactttgattttgagccaagtattgttcgcttttgcgctcaaccgattcgatttttatattatctcaatggtcagtctcactcctatgttcctgactttctagttcaatttgataccaacgagtttgttctatatgaagtaaagtcagcttatgctaagaacaaacctgattttgatgttgaatgggaggcgaaagtaaaagcagcaactgaactagggctagaattggagcttgttgaagagagtgatattagggatacggttgtattaaataatcttaagcgcatgcatcgttatgcttcgaaagatgagctgaataacgtacataactctctcttaaaaataataaagtacaatggcgcccaatctgcaagatgcttgggagaacagttgggtttaaaaggccgaactgttttaccaattttgtgcgatttgctgtcaaggtgtttactcgatacacgtttggataagcctctatctcttgaatctcgatttgagttggccagttatggctaagaaagggttctcaagtttccatagaaaagcagtctcttcccaagatacgcttgaatcgatagagcttgtctctagcgctaattgtctagaaagtgttacgtatcaagatatatcagcatttcccgaaacaattgcggtagagattaatttccgattaagcattcttcgctttttagcgcgaaagtgcgaaaccattgtggccaaatcaattgaaccacatcgtgtagagctacagcaaaactatagtagaaaaatacccagtgcaataacgatatatcgatggtggcttgcttttcgaaaatcagactacaaccccattagcttagcacctaatatcaaggatagaggtaatagagagacaaaagtgtcaacagttgttgattctattatggaacaggcagttgaaagagttatatctggacgaaaagtcaatgttagctctgcatataaacgtgttcgacgaaaagttcgtcaatacaatctaactcatggaacgaaatacacgtatcctaagtacgaatctgtaagaaagcgagtaaaaaagaaaaccccatttgagttattagccgcagggaaaggggagagagtagctaagagagagtttcgccgaatgggaaaaaagatcctcacgtctagcgtgctagagagggttgaaatagatcacactgtcgttgacctttttgcagtacacgaagagtatcgaatcccattgggccgaccttggcttactcaattggttgattgttacagtaaagctgtaatcggtttttatttaggtttcgagcctcctagctatgtgtcggtttcccttgcacttaagaatgcaatacaacgcaaagatgacttaatctcctcgtatgaatcgatcgagaatgaatggctatgttatggcatcccagacctactcgtaactgataatggtaaagagtttttgtcgaaagcatttgatcaagcatgtgaatcactattgatcaatgtgcatcaaaataaagttgagacgcccgacaacaaacctcatgttgaacgtaactacgggactattaatacttctctgttagacgatttacctgggaaatccttcagccagtaccttcaaagagaagggtacgactctgtgggagaagctacccttacactcaatgagattagagaaatttacttaatttggttggtggatatttatcataaaaaacccaatcagagaggcactaattgtcctaatgttgcgtggaaaaagggttgtcaagaatgggaaccagaggagttctctggttctaaagacgaattagactttaaatttgctattgttgattacaaacaacttactaaagtagggataactgtctacaaagaactgagttatagcaatgaccgtttagctgaatatagagggaagaaaggaaaccataaagttcagttcaagtataaccctgagtgtatggcagttatttgggtgttggatgaggatatgaatgagtactttacagttaatgcgattgactacgaatatgcaagtagagtatcactttggcaacataaatataacatgaaatatcaagcagaactaaattcagcagaatatgatgaggacaaggaaattgatgcagaaataaaaattgaagaaatcgcagatcgttcaattgttaagactaacaaaatcagagctcggaggcgtggcgctaggcatcaagagaatagcgcaagggctaagtcaatcagtaatgcgaacccggcctcgatacaaaaacatgaagatgaaatcgttagtgcagataatgacgattgggatattgattatgtctgagaaatcgtcaaatgagtgaaacgcgtgaggctcgtatatcaagagctaaaagggcatttgtatccacaccgagcgttaggaaaatcttgagttacatggatagatgtagagatctatcagacctagagtctgagcctacatgcatgatggtctatggtgcttcgggtgtaggtaaaacgaccgtcatcaagaaatacttaaatcaaaacagaagagagtccgaagccgggggcgatataataccggttttgcatattgagttgccagacaatgcgaagccagtagatgcagcaagggaattgctggttgaaatgggtgacccgctagcactttatgaaactgacttagctagattgacgaaaagactgactgaattaatccctgcggtcggcgtgaagctgattattatcgatgagttccaacatttggtggaagaaaggtcaaatcgggttcttacccaagtaggtaattggctaaaaatgatacttaacaaaacgaaatgtccaattgttatatttggtatgccatactcaaaagttgtactgcaagcaaactcgcaacttcacgggcgattttccattcaggttgaactgcgcccctttagctaccagggaggtagaggtgtatttaaaacttttttggaataccttgataaagccctaccttttgaaaaacaggctggcttagccaacgaaagtttgcagaaaaaattgtatgcattctctcagggaaacatgcgttcgttgagaaaccttatttatcaagcatctatcgaagcaattgataatcagcatgagacgataaccgaagaagatttcgtttttgcatcgaagttgacatcgggcgataaacccaactcatggaaaaatccttttgaggagggtgttgaggtaacagaagatatgttacgaccgccaccaaaagatattggttgggaggactatttgagacattcaaccccgagagtgagtaaaccaggtagaaataaaaactttttcgaataacctaggctgctgcgctgctgccaccgctgagcaataactagcataaccccttggggcctctaaacgggtcttgaggggttttttgctgaaacctcaggcatttgttgttgatacaaccataaaatgataattacacccataaattgataattatcacacccataaattgatattgcctcttcatggtctaaacttcagtaagtttacgacattttcctcgaggtcatttccggggatccatggagaaaaaaatcactggatataccaccgttgatatatcccaatggcatcgtaaagaacattttgaggcatttcagtcagttgctcaatgtacctataaccagaccgttcagctggatattacggcctttttaaagaccgtaaagaaaaataagcacaagttttatccggcctttattcacattcttgcccgcctgatgaatgctcatccggagttccgtatggcaatgaaagacggtgagctggtgatatgggatagtgttcacccttgttacaccgttttccatgagcaaactgaaacgttttcatcgctctggagtgaataccacgacgatttccggcagtttctacacatatattcgcaagatgtggcgtgttacggtgaaaacctggcctatttccctaaagggtttattgagaatatgtttttcgtctcagccaatccctgggtgagtttcaccagttttgatttaaacgtggccaatatggacaacttcttcgcccccgttttcactatgggcaaatattatacgcaaggcgacaaggtgctgatgccgctggcgattcaggttcatcatgccgtttgtgatggcttccatgtcggcagaatgcttaatgaattacaacagtactgcgatgagtggcagggcggggcgtaatttttttaaggcagttattggtgcccttctagagtccttactgcagtagttttgctgaaatactcgattcacaaaaatatcaacttatggttgttttgtgagatatcaatatatggttgttttgtggttaagttgctgattataaataattattaaatatcactttatggttgcatcaacaggtaccgagctcgaattcactggccgtcgttttacaacgtcgtgactgggaaaaccctggcgttacccaacttaatcgccttgctatcgtggccggatcttgcggcccctcggcttgaacgaattgttagacattatttgccgactaccttggtgatctcgcctttcacgtagtggacaaattcttccaactgatctgcgcgcgaggccaagcgatcttcttcttgtccaagataagcctgtctagcttcaagtatgacgggctgatactgggccggcaggcgctccattgcccagtcggcagcgacatccttcggcgcgattttgccggttactgcgctgtaccaaatgcgggacaacgtaagcactacatttcgctcatcgccagcccagtcgggcggcgagttccatagcgttaaggtttcatttagcgcctcaaatagatcctgttcaggaaccggatcaaagagttcctccgccgctggacctaccaaggcaacgctatgttctcttgcttttgtcagcaagatagccagatcaatgtcgatcgtggctggctcgaagatacctgcaagaatgtcattgcgctgccattctccaaattgcagttcgcgcttagctggataacgccacggaatgatgtcgtcgtgcacaacaatggtgacttctacagcgcggagaatctcgctctctccaggggaagccgaagtttccaaaaggtcgttgatcaaagctcgccgcgttgtttcatcaagccttacggtcaccgtaaccagcaaatcaatatcactgtgtggcttcaggccgccatccactgcggagccgtacaaatgtacggccagcaacgtcggttcgagatggcgctcgatgacgccaactacctctgatagttgagtcgatacttcggcgatcaccgcttccctcatactcttcctttttcaatattattgaagcatttatcagggttattgtctcatgagcggatacatatttgaatgtatttagaaaaataaacaaatagctagctcactcggtcgctacgctccgggcgtgagactgcggcgg

SEQ ID NO: 28 - DNA, 12828 bp, artificial sequence
  Synthetic
aacgtggctggcctggttcaccacgcgggaaacggtctgataagagacaccggcatactctgcgacatcgtataacgttactggtttcacattcaccaccctgaattgactctcttccgggcgctatcatgccataccgcgaaaggttttgcgccattcgatggtgtccgggatctcgacgctctcccttatgcgactcctgcattaggaatggataaccgtattaccgcctttgagtgagctgataccgctcgccgcagccgaacgaccgagcgcagcgagtcagtgagcgaggacacaagctttgacagctagctcagtcctaggtataatactagcgtcgacgtggagatataccatgggtgaactgccgagtaggtagctgataacagtacagcgcggctgaaatcatcattaaagcggtgaactgccgagtaggtagctgataacggatccgaattcgagcgaaggagatatacatatgtttttgcaaagacctaaaccttacagcgatgaaagtttagaaagtttctttatccgagtggctaacaaaaatggctacggtgatgtccatcgcttcctagaagccactaaacgattccttcaagacattgaccataatggctatcaaacctttccgactgatataactcggataaacccatactcagctaaaaacagttccagcgcacgaactgcgtcattcctgaaacttgcacaattgacatttaatgaaccgccagagctacttgggttggcaattaacagaacaaacatgaaatactcgccgtcaactagcgcggttgttagaggtgcagaagtctttcctcgcagtttactacggacgcactccatcccctgctgtcctttgtgtctgcgagaaaatggctacgcctcctacctttggcactttcaggggtacgaatactgccacagccataacgtacctttaattaccacttgtagctgtggtaaggagtttgactaccgagtatctgggttaaagggcatttgctgcaaatgcaaggagcctatcaccttaaccagcagggagaacggtcatgaggcagcgtgtactgtttcaaactggcttgctggccatgaatctaaacctctgccaaatcttcctaaaagctaccgatggggtttagttcattggtggatgggtattaaagatagcgagttcgatcacttttcgttcgttcaatttttctcaaactggccaaggtcattccactcgataatcgaagatgaagtagagttcaaccttgagcatgctgttgtcagcacgtctgaattacgactaaaagatcttcttggtcgattgtttttcggttcaattcggttacctgagcggaatcttcaacacaatatcatccttggtgagcttctctgctatttagaaaatcgtttatggcaagacaagggattaatcgccaacctcaaaatgaacgcgttagaggcgactgtaatgttaaattgtagcctcgatcagattgcatcaatggttgaacaacgcatcttgaagccaaatcgaaaaagcaagcccaacagccctcttgatgttaccgattatctatttcatttcggcgatattttctgtctttggttagctgagttccaaagcgatgagtttaaccgttcgttttatgtgtcgaggtggtaaatgcaaactctgaaagaactaatcgcatccaatcctgacgacttaacaactgaacttaagagagcatttcgtccactcacaccgcatattgcaattgatggtaatgaacttgacgcactgacgatattagtcaatttaaccgataagactgatgatcagaaagacctgctcgatcgagccaaatgcaagcaaaaacttcgagatgaaaaatggtgggctagctgcataaattgcgttaattacagacaaagccataacccaaaattcccggatatacgttctgaaggcgtgattcgaacccaagccctgggtgaattaccgagtttcctactctcgtcctcaaaaatcccaccataccattggtcatatagccatgattcaaaatacgtcaacaaaagcgcattcctcaccaatgagttttgttgggatggtgagatctcatgtttgggtgagcttcttaaagatgcagatcacccactttggaatactttgaaaaagttaggttgttctcaaaaaacttgcaaagcaatggcaaaacaactagctgatattactctcacgactatcaatgtcacactcgcaccaaattacctgactcaaatatctctccccgatagtgatacatcctacatttcactctctcctgttgcatcgctatcgatgcaaagccactttcatcagaggctccaagatgaaaatcggcatagcgcgataacgcggtttagccgaactaccaacatgggggtcactgcgatgacatgtggcggcgcatttagaatgttaaagtctggcgctaagttttccagcccccctcatcaccgattaaacagtaaacgaagttggttgacgtcagagcatgttcagtcattaaaacagtaccagcgcctcaacaaaagcctcatacctgaaaactctcggattgcactccgtagaaaatacaaaatcgagcttcaaaatatggtcagatcttggtttgcaatgcaagaccatacccttgattcgaacatacttatccaacatttgaatcatgacctatcttacttaggagccacaaaacgttttgcatacgatccagcgatgaccaagctctttactgagcttttgaaacgagagttatcaaattcaatcaataatggtgagcaacacactaatggatcgtttttagtcctaccgaatatcagggtttgtggcgcaacagctttaagctccccggtaacggtggggattccatcacttacagctttctttggcttcgttcacgcatttgaacggaatataaatcgcaccacctcatcgtttcgtgttgaatcctttgcgatatgcgtccatcaactacatgtcgagaagcgaggtttgacagcagagtttgtggaaaaaggcgacgggactatatccgctcccgcgacccgggatgactggcagtgtgatgtcgtatttagccttattttgaacaccaactttgctcaacatattgaccaagatacgttagttacatcactaccaaagcgattggctcggggttcagcaaaaattgcgattgatgactttaaacatatcaactcattctcgacattagaaacagcgatcgaatctctgccaatagaagctggtaggtggttatcactttacgcacagtcaaacaataatctaagtgatctattagcagccatgacagaggaccatcagctcatggcaagctgcgtcggttaccacttgttagaagagcccaaagataaaccaaactccctcagaggttacaaacacgctatcgccgagtgcatcattggactcattaactcaatcacctttagctcagagactgatcccaacacaatcttttggtcgctaaagaactatcaaaactacctagtggtacagccaaggagtatcaacgatgaaactaccgacaaatctagcctatgagcgctctatcgacccatcagatgtctgtttttttgtcgtctggcccgatgatagaaaaacacctttaacctacaattctcgtactctgctcgggcaaatggaagcggcatcattagcctatgatgtctcaggtcaaccaataaaaagtgccaccgctgaggcgttagctcaagggaaccctcatcaagttgatttctgccacgttccatacggtgcgagtcatattgaatgcagtttctccgtctcgttttcttctgaactacgtcaaccatataagtgtaactcaagcaaagttaaacaaacgctagtgcaattagtcgagctctacgaaacgaaaatcggctggactgagctagcaacccgatatttgatgaacatttgcaacggtaaatggctgtggaaaaatacccgtaaagcctattgctggaacattgtacttacaccttggccttggaacggggaaaaggttggatttgaagatattcgtactaactacacctcacggcaagactttaaaaataataaaaattggtctgctatagttgaaatgatcaaaaccgcattttctagtactgatgggctggcgatatttgaagtcagggccaccttgcacttgccaacgaatgctatggtgcggccaagccaagttttcacagaaaaagaaagtggcagtaaaagtaaatctaaaactcaaaacagtcgagtttttcagagtacaactattgatggtgaacgatcgccaatactaggggcctttaaaacgggagcagctattgcaaccattgacgactggtatcctgaagccactgagccactaagggtcggacggtttggggttcatcgcgaagatgtcacttgctaccgtcatccgtctaccggaaaagattttttctcgatattacaacaagcagagcactatattgaagtgttgagcgccaacaaaactcccgctcaagaaactatcaacgacatgcactttttaatggctaacctgattaagggtgggatgttccagcataaaggagactgactgtgaaatggtattataagacaatcacctttctgccagagttgtgcaacaacgagtcactggctgcaaagtgtctccgcgttctgcatggatttaactatcagtatgagacacgaaatatcggcgtttcatttccgctttggtgtgatgcaacggttggaaaaaagatttcatttgtcagcaagaacaagatagaactcgacttactacttaaacaacactatttcgtccaaatggaacaacttcaatactttcatatatccaacactgttctcgtcccagaagattgtacatacgtttcctttagacgctgtcaatctatagataagctcacagcagcagggctggcaaggaaaatcagacgcctggagaaacgtgctctatctagaggcgagcaatttgacccatcatcttttgctcaaaaagagcatactgcaatagcgcactaccactcacttggggagtccagcaaacagacgaaccgcaactttcgactcaatatcaggatgctctcggagcaaccccgtgaggggaactcgatttttagtagctatggcttatcaaattcagaaaactcgtttcagcctgtacccttaatctgacctttaataaggagatataccatggcgacaagtttacctacgccctcagcaattacgacttcggcgttagagtatgcattccatactcccgctcgcaatctaacgaaatctcgcggaaaaaacattcatcgttatgtcagtgtaaagatgagtaagaggattacggtagaatctactctagagtgtgatgcctgctatcactttgattttgagccaagtattgttcgcttttgcgctcaaccgattcgatttttatattatctcaatggtcagtctcactcctatgttcctgactttctagttcaatttgataccaacgagtttgttctatatgaagtaaagtcagcttatgctaagaacaaacctgattttgatgttgaatgggaggcgaaagtaaaagcagcaactgaactagggctagaattggagcttgttgaagagagtgatattagggatacggttgtattaaataatcttaagcgcatgcatcgttatgcttcgaaagatgagctgaataacgtacataactctctcttaaaaataataaagtacaatggcgcccaatctgcaagatgcttgggagaacagttgggtttaaaaggccgaactgttttaccaattttgtgcgatttgctgtcaaggtgtttactcgatacacgtttggataagcctctatctcttgaatctcgatttgagttggccagttatggctaagaaagggttctcaagtttccatagaaaagcagtctcttcccaagatacgcttgaatcgatagagcttgtctctagcgctaattgtctagaaagtgttacgtatcaagatatatcagcatttcccgaaacaattgcggtagagattaatttccgattaagcattcttcgctttttagcgcgaaagtgcgaaaccattgtggccaaatcaattgaaccacatcgtgtagagctacagcaaaactatagtagaaaaatacccagtgcaataacgatatatcgatggtggcttgcttttcgaaaatcagactacaaccccattagcttagcacctaatatcaaggatagaggtaatagagagacaaaagtgtcaacagttgttgattctattatggaacaggcagttgaaagagttatatctggacgaaaagtcaatgttagctctgcatataaacgtgttcgacgaaaagttcgtcaatacaatctaactcatggaacgaaatacacgtatcctaagtacgaatctgtaagaaagcgagtaaaaaagaaaaccccatttgagttattagccgcagggaaaggggagagagtagctaagagagagtttcgccgaatgggaaaaaagatcctcacgtctagcgtgctagagagggttgaaatagatcacactgtcgttgacctttttgcagtacacgaagagtatcgaatcccattgggccgaccttggcttactcaattggttgattgttacagtaaagctgtaatcggtttttatttaggtttcgagcctcctagctatgtgtcggtttcccttgcacttaagaatgcaatacaacgcaaagatgacttaatctcctcgtatgaatcgatcgagaatgaatggctatgttatggcatcccagacctactcgtaactgataatggtaaagagtttttgtcgaaagcatttgatcaagcatgtgaatcactattgatcaatgtgcatcaaaataaagttgagacgcccgacaacaaacctcatgttgaacgtaactacgggactattaatacttctctgttagacgatttacctgggaaatccttcagccagtaccttcaaagagaagggtacgactctgtgggagaagctacccttacactcaatgagattagagaaatttacttaatttggttggtggatatttatcataaaaaacccaatcagagaggcactaattgtcctaatgttgcgtggaaaaagggttgtcaagaatgggaaccagaggagttctctggttctaaagacgaattagactttaaatttgctattgttgattacaaacaacttactaaagtagggataactgtctacaaagaactgagttatagcaatgaccgtttagctgaatatagagggaagaaaggaaaccataaagttcagttcaagtataaccctgagtgtatggcagttatttgggtgttggatgaggatatgaatgagtactttacagttaatgcgattgactacgaatatgcaagtagagtatcactttggcaacataaatataacatgaaatatcaagcagaactaaattcagcagaatatgatgaggacaaggaaattgatgcagaaataaaaattgaagaaatcgcagatcgttcaattgttaagactaacaaaatcagagctcggaggcgtggcgctaggcatcaagagaatagcgcaagggctaagtcaatcagtaatgcgaacccggcctcgatacaaaaacatgaagatgaaatcgttagtgcagataatgacgattgggatattgattatgtctgagaaatcgtcaaatgagtgaaacgcgtgaggctcgtatatcaagagctaaaagggcatttgtatccacaccgagcgttaggaaaatcttgagttacatggatagatgtagagatctatcagacctagagtctgagcctacatgcatgatggtctatggtgcttcgggtgtaggtaaaacgaccgtcatcaagaaatacttaaatcaaaacagaagagagtccgaagccgggggcgatataataccggttttgcatattgagttgccagacaatgcgaagccagtagatgcagcaagggaattgctggttgaaatgggtgacccgctagcactttatgaaactgacttagctagattgacgaaaagactgactgaattaatccctgcggtcggcgtgaagctgattattatcgatgagttccaacatttggtggaagaaaggtcaaatcgggttcttacccaagtaggtaattggctaaaaatgatacttaacaaaacgaaatgtccaattgttatatttggtatgccatactcaaaagttgtactgcaagcaaactcgcaacttcacgggcgattttccattcaggttgaactgcgcccctttagctaccagggaggtagaggtgtatttaaaacttttttggaataccttgataaagccctaccttttgaaaaacaggctggcttagccaacgaaagtttgcagaaaaaattgtatgcattctctcagggaaacatgcgttcgttgagaaaccttatttatcaagcatctatcgaagcaattgataatcagcatgagacgataaccgaagaagatttcgtttttgcatcgaagttgacatcgggcgataaacccaactcatggaaaaatccttttgaggagggtgttgaggtaacagaagatatgttacgaccgccaccaaaagatattggttgggaggactatttgagacattcaaccccgagagtgagtaaaccaggtagaaataaaaactttttcgaataacctaggctgctgcgctgctgccaccgctgagcaataactagcataaccccttggggcctctaaacgggtcttgaggggttttttgctgaaacctcaggcatttgttgttgatacaaccataaaatgataattacacccataaattgataattatcacacccataaattgatattgcctcttcatggtctaaacttcagtaagtttacgacattttcctcgaggtcatttccggggatccatggagaaaaaaatcactggatataccaccgttgatatatcccaatggcatcgtaaagaacattttgaggcatttcagtcagttgctcaatgtacctataaccagaccgttcagctggatattacggcctttttaaagaccgtaaagaaaaataagcacaagttttatccggcctttattcacattcttgcccgcctgatgaatgctcatccggagttccgtatggcaatgaaagacggtgagctggtgatatgggatagtgttcacccttgttacaccgttttccatgagcaaactgaaacgttttcatcgctctggagtgaataccacgacgatttccggcagtttctacacatatattcgcaagatgtggcgtgttacggtgaaaacctggcctatttccctaaagggtttattgagaatatgtttttcgtctcagccaatccctgggtgagtttcaccagttttgatttaaacgtggccaatatggacaacttcttcgcccccgttttcactatgggcaaatattatacgcaaggcgacaaggtgctgatgccgctggcgattcaggttcatcatgccgtttgtgatggcttccatgtcggcagaatgcttaatgaattacaacagtactgcgatgagtggcagggcggggcgtaatttttttaaggcagttattggtgcccttctagagtccttactgcagtagttttgctgaaatactcgattcacaaaaatatcaacttatggttgttttgtgagatatcaatatatggttgttttgtggttaagttgctgattataaataattattaaatatcactttatggttgcatcaacaggtaccgagctcgaattcactggccgtcgttttacaacgtcgtgactgggaaaaccctggcgttacccaacttaatcgccttgctatcgtggccggatcttgcggcccctcggcttgaacgaattgttagacattatttgccgactaccttggtgatctcgcctttcacgtagtggacaaattcttccaactgatctgcgcgcgaggccaagcgatcttcttcttgtccaagataagcctgtctagcttcaagtatgacgggctgatactgggccggcaggcgctccattgcccagtcggcagcgacatccttcggcgcgattttgccggttactgcgctgtaccaaatgcgggacaacgtaagcactacatttcgctcatcgccagcccagtcgggcggcgagttccatagcgttaaggtttcatttagcgcctcaaatagatcctgttcaggaaccggatcaaagagttcctccgccgctggacctaccaaggcaacgctatgttctcttgcttttgtcagcaagatagccagatcaatgtcgatcgtggctggctcgaagatacctgcaagaatgtcattgcgctgccattctccaaattgcagttcgcgcttagctggataacgccacggaatgatgtcgtcgtgcacaacaatggtgacttctacagcgcggagaatctcgctctctccaggggaagccgaagtttccaaaaggtcgttgatcaaagctcgccgcgttgtttcatcaagccttacggtcaccgtaaccagcaaatcaatatcactgtgtggcttcaggccgccatccactgcggagccgtacaaatgtacggccagcaacgtcggttcgagatggcgctcgatgacgccaactacctctgatagttgagtcgatacttcggcgatcaccgcttccctcatactcttcctttttcaatattattgaagcatttatcagggttattgtctcatgagcggatacatatttgaatgtatttagaaaaataaacaaatagctagctcactcggtcgctacgctccgggcgtgagactgcggcgggcgctgcggacacatacaaagttacccacagattccgtggataagcaggggactaacatgtgaggcaaaacagcagggccgcgccggtggcgtttttccataggctccgccctcctgccagagttcacataaacagacgcttttccggtgcatctgtgggagccgtgaggctcaaccatgaatctgacagtacgggcgaaacccgacaggacttaaagatccccaccgtttccggcgggtcgctccctcttgcgctctcctgttccgaccctgccgtttaccggatacctgttccgcctttctcccttacgggaagtgtggcgctttctcatagctcacacactggtatctcggctcggtgtaggtcgttcgctccaagctgggctgtaagcaagaactccccgttcagcccgactgctgcgccttatccggtaactgttcacttgagtccaacccggaaaagcacggtaaaacgccactggcagcagccattggtaactgggagttcgcagaggatttgtttagctaaacacgcggttgctcttgaagtgtgcgccaaagtccggctacactggaaggacagatttggttgctgtgctctgcgaaagccagttaccacggttaagcagttccccaactgacttaaccttcgatcaaaccacctccccaggtggttttttcgtttacagggcaaaagattacgcgcagaaaaaaaggatctcaagaagatcctttgatcttttctactgaaccgctctagatttcagtgcaatttatctcttcaaatgtagcacctgaagtcagccccatacgatataagttgtaattctcatgttagtcatgccccgcgcccaccggaaggagctgactgggttgaaggctctcaagggcatcggtcgagatcccggtgcctaatgagtgagctaacttacattaattgcgttgcgctcactgcccgctttccagtcgggaaacctgtcgtgccagctgcattaatgaatcggccaacgcgcggggagaggcggtttgcgtattgggcgccagggtggtttttcttttcaccagtgagacgggcaacagctgattgcccttcaccgcctggccctgagagagttgcagcaagcggtccacgctggtttgccccagcaggcgaaaatcctgtttgatggtggttaacggcgggatataacatgagctgtcttcggtatcgtcgtatcccactaccgagatgtccgcaccaacgcgcagcccggactcggtaatggcgcgcattgcgcccagcgccatctgatcgttggcaaccagcatcgcagtgggaacgatgccctcattcagcatttgcatggtttgttgaaaaccggacatggcactccagtcgccttcccgttccgctatcggctgaatttgattgcgagtgagatatttatgccagccagccagacgcagacgcgccgagacagaacttaatgggcccgctaacagcgcgatttgctggtgacccaatgcgaccagatgctccacgcccagtcgcgtaccgtcttcatgggagaaaataatactgttgatgggtgtctggtcagagacatcaagaaataacgccggaacattagtgcaggcagcttccacagcaatggcatcctggtcatccagcggatagttaatgatcagcccactgacgcgttgcgcgagaagattgtgcaccgccgctttacaggcttcgacgccgcttcgttctaccatcgacaccaccacgctggcacccagttgatcggcgcgagatttaatcgccgcgacaatttgcgacggcgcgtgcagggccagactggaggtggcaacgccaatcagcaacgactgtttgcccgccagttgttgtgccacgcggttgggaatgtaattcagctccgccatcgccgcttccactttttcccgcgttttcgcaga

SEQ ID NO: 29 - DNA, 12828 bp, artificial sequence
  Synthetic
aacgtggctggcctggttcaccacgcgggaaacggtctgataagagacaccggcatactctgcgacatcgtataacgttactggtttcacattcaccaccctgaattgactctcttccgggcgctatcatgccataccgcgaaaggttttgcgccattcgatggtgtccgggatctcgacgctctcccttatgcgactcctgcattaggaatggataaccgtattaccgcctttgagtgagctgataccgctcgccgcagccgaacgaccgagcgcagcgagtcagtgagcgaggacacaagcttttacagctagctcagtcctaggtattatgctagcgtcgacgtggagatataccatgggtgaactgccgagtaggtagctgataacagtacagcgcggctgaaatcatcattaaagcggtgaactgccgagtaggtagctgataacggatccgaattcgagcgaaggagatatacatatgtttttgcaaagacctaaaccttacagcgatgaaagtttagaaagtttctttatccgagtggctaacaaaaatggctacggtgatgtccatcgcttcctagaagccactaaacgattccttcaagacattgaccataatggctatcaaacctttccgactgatataactcggataaacccatactcagctaaaaacagttccagcgcacgaactgcgtcattcctgaaacttgcacaattgacatttaatgaaccgccagagctacttgggttggcaattaacagaacaaacatgaaatactcgccgtcaactagcgcggttgttagaggtgcagaagtctttcctcgcagtttactacggacgcactccatcccctgctgtcctttgtgtctgcgagaaaatggctacgcctcctacctttggcactttcaggggtacgaatactgccacagccataacgtacctttaattaccacttgtagctgtggtaaggagtttgactaccgagtatctgggttaaagggcatttgctgcaaatgcaaggagcctatcaccttaaccagcagggagaacggtcatgaggcagcgtgtactgtttcaaactggcttgctggccatgaatctaaacctctgccaaatcttcctaaaagctaccgatggggtttagttcattggtggatgggtattaaagatagcgagttcgatcacttttcgttcgttcaatttttctcaaactggccaaggtcattccactcgataatcgaagatgaagtagagttcaaccttgagcatgctgttgtcagcacgtctgaattacgactaaaagatcttcttggtcgattgtttttcggttcaattcggttacctgagcggaatcttcaacacaatatcatccttggtgagcttctctgctatttagaaaatcgtttatggcaagacaagggattaatcgccaacctcaaaatgaacgcgttagaggcgactgtaatgttaaattgtagcctcgatcagattgcatcaatggttgaacaacgcatcttgaagccaaatcgaaaaagcaagcccaacagccctcttgatgttaccgattatctatttcatttcggcgatattttctgtctttggttagctgagttccaaagcgatgagtttaaccgttcgttttatgtgtcgaggtggtaaatgcaaactctgaaagaactaatcgcatccaatcctgacgacttaacaactgaacttaagagagcatttcgtccactcacaccgcatattgcaattgatggtaatgaacttgacgcactgacgatattagtcaatttaaccgataagactgatgatcagaaagacctgctcgatcgagccaaatgcaagcaaaaacttcgagatgaaaaatggtgggctagctgcataaattgcgttaattacagacaaagccataacccaaaattcccggatatacgttctgaaggcgtgattcgaacccaagccctgggtgaattaccgagtttcctactctcgtcctcaaaaatcccaccataccattggtcatatagccatgattcaaaatacgtcaacaaaagcgcattcctcaccaatgagttttgttgggatggtgagatctcatgtttgggtgagcttcttaaagatgcagatcacccactttggaatactttgaaaaagttaggttgttctcaaaaaacttgcaaagcaatggcaaaacaactagctgatattactctcacgactatcaatgtcacactcgcaccaaattacctgactcaaatatctctccccgatagtgatacatcctacatttcactctctcctgttgcatcgctatcgatgcaaagccactttcatcagaggctccaagatgaaaatcggcatagcgcgataacgcggtttagccgaactaccaacatgggggtcactgcgatgacatgtggcggcgcatttagaatgttaaagtctggcgctaagttttccagcccccctcatcaccgattaaacagtaaacgaagttggttgacgtcagagcatgttcagtcattaaaacagtaccagcgcctcaacaaaagcctcatacctgaaaactctcggattgcactccgtagaaaatacaaaatcgagcttcaaaatatggtcagatcttggtttgcaatgcaagaccatacccttgattcgaacatacttatccaacatttgaatcatgacctatcttacttaggagccacaaaacgttttgcatacgatccagcgatgaccaagctctttactgagcttttgaaacgagagttatcaaattcaatcaataatggtgagcaacacactaatggatcgtttttagtcctaccgaatatcagggtttgtggcgcaacagctttaagctccccggtaacggtggggattccatcacttacagctttctttggcttcgttcacgcatttgaacggaatataaatcgcaccacctcatcgtttcgtgttgaatcctttgcgatatgcgtccatcaactacatgtcgagaagcgaggtttgacagcagagtttgtggaaaaaggcgacgggactatatccgctcccgcgacccgggatgactggcagtgtgatgtcgtatttagccttattttgaacaccaactttgctcaacatattgaccaagatacgttagttacatcactaccaaagcgattggctcggggttcagcaaaaattgcgattgatgactttaaacatatcaactcattctcgacattagaaacagcgatcgaatctctgccaatagaagctggtaggtggttatcactttacgcacagtcaaacaataatctaagtgatctattagcagccatgacagaggaccatcagctcatggcaagctgcgtcggttaccacttgttagaagagcccaaagataaaccaaactccctcagaggttacaaacacgctatcgccgagtgcatcattggactcattaactcaatcacctttagctcagagactgatcccaacacaatcttttggtcgctaaagaactatcaaaactacctagtggtacagccaaggagtatcaacgatgaaactaccgacaaatctagcctatgagcgctctatcgacccatcagatgtctgtttttttgtcgtctggcccgatgatagaaaaacacctttaacctacaattctcgtactctgctcgggcaaatggaagcggcatcattagcctatgatgtctcaggtcaaccaataaaaagtgccaccgctgaggcgttagctcaagggaaccctcatcaagttgatttctgccacgttccatacggtgcgagtcatattgaatgcagtttctccgtctcgttttcttctgaactacgtcaaccatataagtgtaactcaagcaaagttaaacaaacgctagtgcaattagtcgagctctacgaaacgaaaatcggctggactgagctagcaacccgatatttgatgaacatttgcaacggtaaatggctgtggaaaaatacccgtaaagcctattgctggaacattgtacttacaccttggccttggaacggggaaaaggttggatttgaagatattcgtactaactacacctcacggcaagactttaaaaataataaaaattggtctgctatagttgaaatgatcaaaaccgcattttctagtactgatgggctggcgatatttgaagtcagggccaccttgcacttgccaacgaatgctatggtgcggccaagccaagttttcacagaaaaagaaagtggcagtaaaagtaaatctaaaactcaaaacagtcgagtttttcagagtacaactattgatggtgaacgatcgccaatactaggggcctttaaaacgggagcagctattgcaaccattgacgactggtatcctgaagccactgagccactaagggtcggacggtttggggttcatcgcgaagatgtcacttgctaccgtcatccgtctaccggaaaagattttttctcgatattacaacaagcagagcactatattgaagtgttgagcgccaacaaaactcccgctcaagaaactatcaacgacatgcactttttaatggctaacctgattaagggtgggatgttccagcataaaggagactgactgtgaaatggtattataagacaatcacctttctgccagagttgtgcaacaacgagtcactggctgcaaagtgtctccgcgttctgcatggatttaactatcagtatgagacacgaaatatcggcgtttcatttccgctttggtgtgatgcaacggttggaaaaaagatttcatttgtcagcaagaacaagatagaactcgacttactacttaaacaacactatttcgtccaaatggaacaacttcaatactttcatatatccaacactgttctcgtcccagaagattgtacatacgtttcctttagacgctgtcaatctatagataagctcacagcagcagggctggcaaggaaaatcagacgcctggagaaacgtgctctatctagaggcgagcaatttgacccatcatcttttgctcaaaaagagcatactgcaatagcgcactaccactcacttggggagtccagcaaacagacgaaccgcaactttcgactcaatatcaggatgctctcggagcaaccccgtgaggggaactcgatttttagtagctatggcttatcaaattcagaaaactcgtttcagcctgtacccttaatctgacctttaataaggagatataccatggcgacaagtttacctacgccctcagcaattacgacttcggcgttagagtatgcattccatactcccgctcgcaatctaacgaaatctcgcggaaaaaacattcatcgttatgtcagtgtaaagatgagtaagaggattacggtagaatctactctagagtgtgatgcctgctatcactttgattttgagccaagtattgttcgcttttgcgctcaaccgattcgatttttatattatctcaatggtcagtctcactcctatgttcctgactttctagttcaatttgataccaacgagtttgttctatatgaagtaaagtcagcttatgctaagaacaaacctgattttgatgttgaatgggaggcgaaagtaaaagcagcaactgaactagggctagaattggagcttgttgaagagagtgatattagggatacggttgtattaaataatcttaagcgcatgcatcgttatgcttcgaaagatgagctgaataacgtacataactctctcttaaaaataataaagtacaatggcgcccaatctgcaagatgcttgggagaacagttgggtttaaaaggccgaactgttttaccaattttgtgcgatttgctgtcaaggtgtttactcgatacacgtttggataagcctctatctcttgaatctcgatttgagttggccagttatggctaagaaagggttctcaagtttccatagaaaagcagtctcttcccaagatacgcttgaatcgatagagcttgtctctagcgctaattgtctagaaagtgttacgtatcaagatatatcagcatttcccgaaacaattgcggtagagattaatttccgattaagcattcttcgctttttagcgcgaaagtgcgaaaccattgtggccaaatcaattgaaccacatcgtgtagagctacagcaaaactatagtagaaaaatacccagtgcaataacgatatatcgatggtggcttgcttttcgaaaatcagactacaaccccattagcttagcacctaatatcaaggatagaggtaatagagagacaaaagtgtcaacagttgttgattctattatggaacaggcagttgaaagagttatatctggacgaaaagtcaatgttagctctgcatataaacgtgttcgacgaaaagttcgtcaatacaatctaactcatggaacgaaatacacgtatcctaagtacgaatctgtaagaaagcgagtaaaaaagaaaaccccatttgagttattagccgcagggaaaggggagagagtagctaagagagagtttcgccgaatgggaaaaaagatcctcacgtctagcgtgctagagagggttgaaatagatcacactgtcgttgacctttttgcagtacacgaagagtatcgaatcccattgggccgaccttggcttactcaattggttgattgttacagtaaagctgtaatcggtttttatttaggtttcgagcctcctagctatgtgtcggtttcccttgcacttaagaatgcaatacaacgcaaagatgacttaatctcctcgtatgaatcgatcgagaatgaatggctatgttatggcatcccagacctactcgtaactgataatggtaaagagtttttgtcgaaagcatttgatcaagcatgtgaatcactattgatcaatgtgcatcaaaataaagttgagacgcccgacaacaaacctcatgttgaacgtaactacgggactattaatacttctctgttagacgatttacctgggaaatccttcagccagtaccttcaaagagaagggtacgactctgtgggagaagctacccttacactcaatgagattagagaaatttacttaatttggttggtggatatttatcataaaaaacccaatcagagaggcactaattgtcctaatgttgcgtggaaaaagggttgtcaagaatgggaaccagaggagttctctggttctaaagacgaattagactttaaatttgctattgttgattacaaacaacttactaaagtagggataactgtctacaaagaactgagttatagcaatgaccgtttagctgaatatagagggaagaaaggaaaccataaagttcagttcaagtataaccctgagtgtatggcagttatttgggtgttggatgaggatatgaatgagtactttacagttaatgcgattgactacgaatatgcaagtagagtatcactttggcaacataaatataacatgaaatatcaagcagaactaaattcagcagaatatgatgaggacaaggaaattgatgcagaaataaaaattgaagaaatcgcagatcgttcaattgttaagactaacaaaatcagagctcggaggcgtggcgctaggcatcaagagaatagcgcaagggctaagtcaatcagtaatgcgaacccggcctcgatacaaaaacatgaagatgaaatcgttagtgcagataatgacgattgggatattgattatgtctgagaaatcgtcaaatgagtgaaacgcgtgaggctcgtatatcaagagctaaaagggcatttgtatccacaccgagcgttaggaaaatcttgagttacatggatagatgtagagatctatcagacctagagtctgagcctacatgcatgatggtctatggtgcttcgggtgtaggtaaaacgaccgtcatcaagaaatacttaaatcaaaacagaagagagtccgaagccgggggcgatataataccggttttgcatattgagttgccagacaatgcgaagccagtagatgcagcaagggaattgctggttgaaatgggtgacccgctagcactttatgaaactgacttagctagattgacgaaaagactgactgaattaatccctgcggtcggcgtgaagctgattattatcgatgagttccaacatttggtggaagaaaggtcaaatcgggttcttacccaagtaggtaattggctaaaaatgatacttaacaaaacgaaatgtccaattgttatatttggtatgccatactcaaaagttgtactgcaagcaaactcgcaacttcacgggcgattttccattcaggttgaactgcgcccctttagctaccagggaggtagaggtgtatttaaaacttttttggaataccttgataaagccctaccttttgaaaaacaggctggcttagccaacgaaagtttgcagaaaaaattgtatgcattctctcagggaaacatgcgttcgttgagaaaccttatttatcaagcatctatcgaagcaattgataatcagcatgagacgataaccgaagaagatttcgtttttgcatcgaagttgacatcgggcgataaacccaactcatggaaaaatccttttgaggagggtgttgaggtaacagaagatatgttacgaccgccaccaaaagatattggttgggaggactatttgagacattcaaccccgagagtgagtaaaccaggtagaaataaaaactttttcgaataacctaggctgctgcgctgctgccaccgctgagcaataactagcataaccccttggggcctctaaacgggtcttgaggggttttttgctgaaacctcaggcatttgttgttgatacaaccataaaatgataattacacccataaattgataattatcacacccataaattgatattgcctcttcatggtctaaacttcagtaagtttacgacattttcctcgaggtcatttccggggatccatggagaaaaaaatcactggatataccaccgttgatatatcccaatggcatcgtaaagaacattttgaggcatttcagtcagttgctcaatgtacctataaccagaccgttcagctggatattacggcctttttaaagaccgtaaagaaaaataagcacaagttttatccggcctttattcacattcttgcccgcctgatgaatgctcatccggagttccgtatggcaatgaaagacggtgagctggtgatatgggatagtgttcacccttgttacaccgttttccatgagcaaactgaaacgttttcatcgctctggagtgaataccacgacgatttccggcagtttctacacatatattcgcaagatgtggcgtgttacggtgaaaacctggcctatttccctaaagggtttattgagaatatgtttttcgtctcagccaatccctgggtgagtttcaccagttttgatttaaacgtggccaatatggacaacttcttcgcccccgttttcactatgggcaaatattatacgcaaggcgacaaggtgctgatgccgctggcgattcaggttcatcatgccgtttgtgatggcttccatgtcggcagaatgcttaatgaattacaacagtactgcgatgagtggcagggcggggcgtaatttttttaaggcagttattggtgcccttctagagtccttactgcagtagttttgctgaaatactcgattcacaaaaatatcaacttatggttgttttgtgagatatcaatatatggttgttttgtggttaagttgctgattataaataattattaaatatcactttatggttgcatcaacaggtaccgagctcgaattcactggccgtcgttttacaacgtcgtgactgggaaaaccctggcgttacccaacttaatcgccttgctatcgtggccggatcttgcggcccctcggcttgaacgaattgttagacattatttgccgactaccttggtgatctcgcctttcacgtagtggacaaattcttccaactgatctgcgcgcgaggccaagcgatcttcttcttgtccaagataagcctgtctagcttcaagtatgacgggctgatactgggccggcaggcgctccattgcccagtcggcagcgacatccttcggcgcgattttgccggttactgcgctgtaccaaatgcgggacaacgtaagcactacatttcgctcatcgccagcccagtcgggcggcgagttccatagcgttaaggtttcatttagcgcctcaaatagatcctgttcaggaaccggatcaaagagttcctccgccgctggacctaccaaggcaacgctatgttctcttgcttttgtcagcaagatagccagatcaatgtcgatcgtggctggctcgaagatacctgcaagaatgtcattgcgctgccattctccaaattgcagttcgcgcttagctggataacgccacggaatgatgtcgtcgtgcacaacaatggtgacttctacagcgcggagaatctcgctctctccaggggaagccgaagtttccaaaaggtcgttgatcaaagctcgccgcgttgtttcatcaagccttacggtcaccgtaaccagcaaatcaatatcactgtgtggcttcaggccgccatccactgcggagccgtacaaatgtacggccagcaacgtcggttcgagatggcgctcgatgacgccaactacctctgatagttgagtcgatacttcggcgatcaccgcttccctcatactcttcctttttcaatattattgaagcatttatcagggttattgtctcatgagcggatacatatttgaatgtatttagaaaaataaacaaatagctagctcactcggtcgctacgctccgggcgtgagactgcggcgggcgctgcggacacatacaaagttacccacagattccgtggataagcaggggactaacatgtgaggcaaaacagcagggccgcgccggtggcgtttttccataggctccgccctcctgccagagttcacataaacagacgcttttccggtgcatctgtgggagccgtgaggctcaaccatgaatctgacagtacgggcgaaacccgacaggacttaaagatccccaccgtttccggcgggtcgctccctcttgcgctctcctgttccgaccctgccgtttaccggatacctgttccgcctttctcccttacgggaagtgtggcgctttctcatagctcacacactggtatctcggctcggtgtaggtcgttcgctccaagctgggctgtaagcaagaactccccgttcagcccgactgctgcgccttatccggtaactgttcacttgagtccaacccggaaaagcacggtaaaacgccactggcagcagccattggtaactgggagttcgcagaggatttgtttagctaaacacgcggttgctcttgaagtgtgcgccaaagtccggctacactggaaggacagatttggttgctgtgctctgcgaaagccagttaccacggttaagcagttccccaactgacttaaccttcgatcaaaccacctccccaggtggttttttcgtttacagggcaaaagattacgcgcagaaaaaaaggatctcaagaagatcctttgatcttttctactgaaccgctctagatttcagtgcaatttatctcttcaaatgtagcacctgaagtcagccccatacgatataagttgtaattctcatgttagtcatgccccgcgcccaccggaaggagctgactgggttgaaggctctcaagggcatcggtcgagatcccggtgcctaatgagtgagctaacttacattaattgcgttgcgctcactgcccgctttccagtcgggaaacctgtcgtgccagctgcattaatgaatcggccaacgcgcggggagaggcggtttgcgtattgggcgccagggtggtttttcttttcaccagtgagacgggcaacagctgattgcccttcaccgcctggccctgagagagttgcagcaagcggtccacgctggtttgccccagcaggcgaaaatcctgtttgatggtggttaacggcgggatataacatgagctgtcttcggtatcgtcgtatcccactaccgagatgtccgcaccaacgcgcagcccggactcggtaatggcgcgcattgcgcccagcgccatctgatcgttggcaaccagcatcgcagtgggaacgatgccctcattcagcatttgcatggtttgttgaaaaccggacatggcactccagtcgccttcccgttccgctatcggctgaatttgattgcgagtgagatatttatgccagccagccagacgcagacgcgccgagacagaacttaatgggcccgctaacagcgcgatttgctggtgacccaatgcgaccagatgctccacgcccagtcgcgtaccgtcttcatgggagaaaataatactgttgatgggtgtctggtcagagacatcaagaaataacgccggaacattagtgcaggcagcttccacagcaatggcatcctggtcatccagcggatagttaatgatcagcccactgacgcgttgcgcgagaagattgtgcaccgccgctttacaggcttcgacgccgcttcgttctaccatcgacaccaccacgctggcacccagttgatcggcgcgagatttaatcgccgcgacaatttgcgacggcgcgtgcagggccagactggaggtggcaacgccaatcagcaacgactgtttgcccgccagttgttgtgccacgcggttgggaatgtaattcagctccgccatcgccgcttccactttttcccgcgttttcgcaga

SEQ ID NO: 30 - DNA, 12828 bp, artificial sequence
  Synthetic
aacgtggctggcctggttcaccacgcgggaaacggtctgataagagacaccggcatactctgcgacatcgtataacgttactggtttcacattcaccaccctgaattgactctcttccgggcgctatcatgccataccgcgaaaggttttgcgccattcgatggtgtccgggatctcgacgctctcccttatgcgactcctgcattaggaatggataaccgtattaccgcctttgagtgagctgataccgctcgccgcagccgaacgaccgagcgcagcgagtcagtgagcgaggacacaagcttttacggctagctcagtcctaggtactatgctagcgtcgacgtggagatataccatgggtgaactgccgagtaggtagctgataacagtacagcgcggctgaaatcatcattaaagcggtgaactgccgagtaggtagctgataacggatccgaattcgagcgaaggagatatacatatgtttttgcaaagacctaaaccttacagcgatgaaagtttagaaagtttctttatccgagtggctaacaaaaatggctacggtgatgtccatcgcttcctagaagccactaaacgattccttcaagacattgaccataatggctatcaaacctttccgactgatataactcggataaacccatactcagctaaaaacagttccagcgcacgaactgcgtcattcctgaaacttgcacaattgacatttaatgaaccgccagagctacttgggttggcaattaacagaacaaacatgaaatactcgccgtcaactagcgcggttgttagaggtgcagaagtctttcctcgcagtttactacggacgcactccatcccctgctgtcctttgtgtctgcgagaaaatggctacgcctcctacctttggcactttcaggggtacgaatactgccacagccataacgtacctttaattaccacttgtagctgtggtaaggagtttgactaccgagtatctgggttaaagggcatttgctgcaaatgcaaggagcctatcaccttaaccagcagggagaacggtcatgaggcagcgtgtactgtttcaaactggcttgctggccatgaatctaaacctctgccaaatcttcctaaaagctaccgatggggtttagttcattggtggatgggtattaaagatagcgagttcgatcacttttcgttcgttcaatttttctcaaactggccaaggtcattccactcgataatcgaagatgaagtagagttcaaccttgagcatgctgttgtcagcacgtctgaattacgactaaaagatcttcttggtcgattgtttttcggttcaattcggttacctgagcggaatcttcaacacaatatcatccttggtgagcttctctgctatttagaaaatcgtttatggcaagacaagggattaatcgccaacctcaaaatgaacgcgttagaggcgactgtaatgttaaattgtagcctcgatcagattgcatcaatggttgaacaacgcatcttgaagccaaatcgaaaaagcaagcccaacagccctcttgatgttaccgattatctatttcatttcggcgatattttctgtctttggttagctgagttccaaagcgatgagtttaaccgttcgttttatgtgtcgaggtggtaaatgcaaactctgaaagaactaatcgcatccaatcctgacgacttaacaactgaacttaagagagcatttcgtccactcacaccgcatattgcaattgatggtaatgaacttgacgcactgacgatattagtcaatttaaccgataagactgatgatcagaaagacctgctcgatcgagccaaatgcaagcaaaaacttcgagatgaaaaatggtgggctagctgcataaattgcgttaattacagacaaagccataacccaaaattcccggatatacgttctgaaggcgtgattcgaacccaagccctgggtgaattaccgagtttcctactctcgtcctcaaaaatcccaccataccattggtcatatagccatgattcaaaatacgtcaacaaaagcgcattcctcaccaatgagttttgttgggatggtgagatctcatgtttgggtgagcttcttaaagatgcagatcacccactttggaatactttgaaaaagttaggttgttctcaaaaaacttgcaaagcaatggcaaaacaactagctgatattactctcacgactatcaatgtcacactcgcaccaaattacctgactcaaatatctctccccgatagtgatacatcctacatttcactctctcctgttgcatcgctatcgatgcaaagccactttcatcagaggctccaagatgaaaatcggcatagcgcgataacgcggtttagccgaactaccaacatgggggtcactgcgatgacatgtggcggcgcatttagaatgttaaagtctggcgctaagttttccagcccccctcatcaccgattaaacagtaaacgaagttggttgacgtcagagcatgttcagtcattaaaacagtaccagcgcctcaacaaaagcctcatacctgaaaactctcggattgcactccgtagaaaatacaaaatcgagcttcaaaatatggtcagatcttggtttgcaatgcaagaccatacccttgattcgaacatacttatccaacatttgaatcatgacctatcttacttaggagccacaaaacgttttgcatacgatccagcgatgaccaagctctttactgagcttttgaaacgagagttatcaaattcaatcaataatggtgagcaacacactaatggatcgtttttagtcctaccgaatatcagggtttgtggcgcaacagctttaagctccccggtaacggtggggattccatcacttacagctttctttggcttcgttcacgcatttgaacggaatataaatcgcaccacctcatcgtttcgtgttgaatcctttgcgatatgcgtccatcaactacatgtcgagaagcgaggtttgacagcagagtttgtggaaaaaggcgacgggactatatccgctcccgcgacccgggatgactggcagtgtgatgtcgtatttagccttattttgaacaccaactttgctcaacatattgaccaagatacgttagttacatcactaccaaagcgattggctcggggttcagcaaaaattgcgattgatgactttaaacatatcaactcattctcgacattagaaacagcgatcgaatctctgccaatagaagctggtaggtggttatcactttacgcacagtcaaacaataatctaagtgatctattagcagccatgacagaggaccatcagctcatggcaagctgcgtcggttaccacttgttagaagagcccaaagataaaccaaactccctcagaggttacaaacacgctatcgccgagtgcatcattggactcattaactcaatcacctttagctcagagactgatcccaacacaatcttttggtcgctaaagaactatcaaaactacctagtggtacagccaaggagtatcaacgatgaaactaccgacaaatctagcctatgagcgctctatcgacccatcagatgtctgtttttttgtcgtctggcccgatgatagaaaaacacctttaacctacaattctcgtactctgctcgggcaaatggaagcggcatcattagcctatgatgtctcaggtcaaccaataaaaagtgccaccgctgaggcgttagctcaagggaaccctcatcaagttgatttctgccacgttccatacggtgcgagtcatattgaatgcagtttctccgtctcgttttcttctgaactacgtcaaccatataagtgtaactcaagcaaagttaaacaaacgctagtgcaattagtcgagctctacgaaacgaaaatcggctggactgagctagcaacccgatatttgatgaacatttgcaacggtaaatggctgtggaaaaatacccgtaaagcctattgctggaacattgtacttacaccttggccttggaacggggaaaaggttggatttgaagatattcgtactaactacacctcacggcaagactttaaaaataataaaaattggtctgctatagttgaaatgatcaaaaccgcattttctagtactgatgggctggcgatatttgaagtcagggccaccttgcacttgccaacgaatgctatggtgcggccaagccaagttttcacagaaaaagaaagtggcagtaaaagtaaatctaaaactcaaaacagtcgagtttttcagagtacaactattgatggtgaacgatcgccaatactaggggcctttaaaacgggagcagctattgcaaccattgacgactggtatcctgaagccactgagccactaagggtcggacggtttggggttcatcgcgaagatgtcacttgctaccgtcatccgtctaccggaaaagattttttctcgatattacaacaagcagagcactatattgaagtgttgagcgccaacaaaactcccgctcaagaaactatcaacgacatgcactttttaatggctaacctgattaagggtgggatgttccagcataaaggagactgactgtgaaatggtattataagacaatcacctttctgccagagttgtgcaacaacgagtcactggctgcaaagtgtctccgcgttctgcatggatttaactatcagtatgagacacgaaatatcggcgtttcatttccgctttggtgtgatgcaacggttggaaaaaagatttcatttgtcagcaagaacaagatagaactcgacttactacttaaacaacactatttcgtccaaatggaacaacttcaatactttcatatatccaacactgttctcgtcccagaagattgtacatacgtttcctttagacgctgtcaatctatagataagctcacagcagcagggctggcaaggaaaatcagacgcctggagaaacgtgctctatctagaggcgagcaatttgacccatcatcttttgctcaaaaagagcatactgcaatagcgcactaccactcacttggggagtccagcaaacagacgaaccgcaactttcgactcaatatcaggatgctctcggagcaaccccgtgaggggaactcgatttttagtagctatggcttatcaaattcagaaaactcgtttcagcctgtacccttaatctgacctttaataaggagatataccatggcgacaagtttacctacgccctcagcaattacgacttcggcgttagagtatgcattccatactcccgctcgcaatctaacgaaatctcgcggaaaaaacattcatcgttatgtcagtgtaaagatgagtaagaggattacggtagaatctactctagagtgtgatgcctgctatcactttgattttgagccaagtattgttcgcttttgcgctcaaccgattcgatttttatattatctcaatggtcagtctcactcctatgttcctgactttctagttcaatttgataccaacgagtttgttctatatgaagtaaagtcagcttatgctaagaacaaacctgattttgatgttgaatgggaggcgaaagtaaaagcagcaactgaactagggctagaattggagcttgttgaagagagtgatattagggatacggttgtattaaataatcttaagcgcatgcatcgttatgcttcgaaagatgagctgaataacgtacataactctctcttaaaaataataaagtacaatggcgcccaatctgcaagatgcttgggagaacagttgggtttaaaaggccgaactgttttaccaattttgtgcgatttgctgtcaaggtgtttactcgatacacgtttggataagcctctatctcttgaatctcgatttgagttggccagttatggctaagaaagggttctcaagtttccatagaaaagcagtctcttcccaagatacgcttgaatcgatagagcttgtctctagcgctaattgtctagaaagtgttacgtatcaagatatatcagcatttcccgaaacaattgcggtagagattaatttccgattaagcattcttcgctttttagcgcgaaagtgcgaaaccattgtggccaaatcaattgaaccacatcgtgtagagctacagcaaaactatagtagaaaaatacccagtgcaataacgatatatcgatggtggcttgcttttcgaaaatcagactacaaccccattagcttagcacctaatatcaaggatagaggtaatagagagacaaaagtgtcaacagttgttgattctattatggaacaggcagttgaaagagttatatctggacgaaaagtcaatgttagctctgcatataaacgtgttcgacgaaaagttcgtcaatacaatctaactcatggaacgaaatacacgtatcctaagtacgaatctgtaagaaagcgagtaaaaaagaaaaccccatttgagttattagccgcagggaaaggggagagagtagctaagagagagtttcgccgaatgggaaaaaagatcctcacgtctagcgtgctagagagggttgaaatagatcacactgtcgttgacctttttgcagtacacgaagagtatcgaatcccattgggccgaccttggcttactcaattggttgattgttacagtaaagctgtaatcggtttttatttaggtttcgagcctcctagctatgtgtcggtttcccttgcacttaagaatgcaatacaacgcaaagatgacttaatctcctcgtatgaatcgatcgagaatgaatggctatgttatggcatcccagacctactcgtaactgataatggtaaagagtttttgtcgaaagcatttgatcaagcatgtgaatcactattgatcaatgtgcatcaaaataaagttgagacgcccgacaacaaacctcatgttgaacgtaactacgggactattaatacttctctgttagacgatttacctgggaaatccttcagccagtaccttcaaagagaagggtacgactctgtgggagaagctacccttacactcaatgagattagagaaatttacttaatttggttggtggatatttatcataaaaaacccaatcagagaggcactaattgtcctaatgttgcgtggaaaaagggttgtcaagaatgggaaccagaggagttctctggttctaaagacgaattagactttaaatttgctattgttgattacaaacaacttactaaagtagggataactgtctacaaagaactgagttatagcaatgaccgtttagctgaatatagagggaagaaaggaaaccataaagttcagttcaagtataaccctgagtgtatggcagttatttgggtgttggatgaggatatgaatgagtactttacagttaatgcgattgactacgaatatgcaagtagagtatcactttggcaacataaatataacatgaaatatcaagcagaactaaattcagcagaatatgatgaggacaaggaaattgatgcagaaataaaaattgaagaaatcgcagatcgttcaattgttaagactaacaaaatcagagctcggaggcgtggcgctaggcatcaagagaatagcgcaagggctaagtcaatcagtaatgcgaacccggcctcgatacaaaaacatgaagatgaaatcgttagtgcagataatgacgattgggatattgattatgtctgagaaatcgtcaaatgagtgaaacgcgtgaggctcgtatatcaagagctaaaagggcatttgtatccacaccgagcgttaggaaaatcttgagttacatggatagatgtagagatctatcagacctagagtctgagcctacatgcatgatggtctatggtgcttcgggtgtaggtaaaacgaccgtcatcaagaaatacttaaatcaaaacagaagagagtccgaagccgggggcgatataataccggttttgcatattgagttgccagacaatgcgaagccagtagatgcagcaagggaattgctggttgaaatgggtgacccgctagcactttatgaaactgacttagctagattgacgaaaagactgactgaattaatccctgcggtcggcgtgaagctgattattatcgatgagttccaacatttggtggaagaaaggtcaaatcgggttcttacccaagtaggtaattggctaaaaatgatacttaacaaaacgaaatgtccaattgttatatttggtatgccatactcaaaagttgtactgcaagcaaactcgcaacttcacgggcgattttccattcaggttgaactgcgcccctttagctaccagggaggtagaggtgtatttaaaacttttttggaataccttgataaagccctaccttttgaaaaacaggctggcttagccaacgaaagtttgcagaaaaaattgtatgcattctctcagggaaacatgcgttcgttgagaaaccttatttatcaagcatctatcgaagcaattgataatcagcatgagacgataaccgaagaagatttcgtttttgcatcgaagttgacatcgggcgataaacccaactcatggaaaaatccttttgaggagggtgttgaggtaacagaagatatgttacgaccgccaccaaaagatattggttgggaggactatttgagacattcaaccccgagagtgagtaaaccaggtagaaataaaaactttttcgaataacctaggctgctgcgctgctgccaccgctgagcaataactagcataaccccttggggcctctaaacgggtcttgaggggttttttgctgaaacctcaggcatttgttgttgatacaaccataaaatgataattacacccataaattgataattatcacacccataaattgatattgcctcttcatggtctaaacttcagtaagtttacgacattttcctcgaggtcatttccggggatccatggagaaaaaaatcactggatataccaccgttgatatatcccaatggcatcgtaaagaacattttgaggcatttcagtcagttgctcaatgtacctataaccagaccgttcagctggatattacggcctttttaaagaccgtaaagaaaaataagcacaagttttatccggcctttattcacattcttgcccgcctgatgaatgctcatccggagttccgtatggcaatgaaagacggtgagctggtgatatgggatagtgttcacccttgttacaccgttttccatgagcaaactgaaacgttttcatcgctctggagtgaataccacgacgatttccggcagtttctacacatatattcgcaagatgtggcgtgttacggtgaaaacctggcctatttccctaaagggtttattgagaatatgtttttcgtctcagccaatccctgggtgagtttcaccagttttgatttaaacgtggccaatatggacaacttcttcgcccccgttttcactatgggcaaatattatacgcaaggcgacaaggtgctgatgccgctggcgattcaggttcatcatgccgtttgtgatggcttccatgtcggcagaatgcttaatgaattacaacagtactgcgatgagtggcagggcggggcgtaatttttttaaggcagttattggtgcccttctagagtccttactgcagtagttttgctgaaatactcgattcacaaaaatatcaacttatggttgttttgtgagatatcaatatatggttgttttgtggttaagttgctgattataaataattattaaatatcactttatggttgcatcaacaggtaccgagctcgaattcactggccgtcgttttacaacgtcgtgactgggaaaaccctggcgttacccaacttaatcgccttgctatcgtggccggatcttgcggcccctcggcttgaacgaattgttagacattatttgccgactaccttggtgatctcgcctttcacgtagtggacaaattcttccaactgatctgcgcgcgaggccaagcgatcttcttcttgtccaagataagcctgtctagcttcaagtatgacgggctgatactgggccggcaggcgctccattgcccagtcggcagcgacatccttcggcgcgattttgccggttactgcgctgtaccaaatgcgggacaacgtaagcactacatttcgctcatcgccagcccagtcgggcggcgagttccatagcgttaaggtttcatttagcgcctcaaatagatcctgttcaggaaccggatcaaagagttcctccgccgctggacctaccaaggcaacgctatgttctcttgcttttgtcagcaagatagccagatcaatgtcgatcgtggctggctcgaagatacctgcaagaatgtcattgcgctgccattctccaaattgcagttcgcgcttagctggataacgccacggaatgatgtcgtcgtgcacaacaatggtgacttctacagcgcggagaatctcgctctctccaggggaagccgaagtttccaaaaggtcgttgatcaaagctcgccgcgttgtttcatcaagccttacggtcaccgtaaccagcaaatcaatatcactgtgtggcttcaggccgccatccactgcggagccgtacaaatgtacggccagcaacgtcggttcgagatggcgctcgatgacgccaactacctctgatagttgagtcgatacttcggcgatcaccgcttccctcatactcttcctttttcaatattattgaagcatttatcagggttattgtctcatgagcggatacatatttgaatgtatttagaaaaataaacaaatagctagctcactcggtcgctacgctccgggcgtgagactgcggcgggcgctgcggacacatacaaagttacccacagattccgtggataagcaggggactaacatgtgaggcaaaacagcagggccgcgccggtggcgtttttccataggctccgccctcctgccagagttcacataaacagacgcttttccggtgcatctgtgggagccgtgaggctcaaccatgaatctgacagtacgggcgaaacccgacaggacttaaagatccccaccgtttccggcgggtcgctccctcttgcgctctcctgttccgaccctgccgtttaccggatacctgttccgcctttctcccttacgggaagtgtggcgctttctcatagctcacacactggtatctcggctcggtgtaggtcgttcgctccaagctgggctgtaagcaagaactccccgttcagcccgactgctgcgccttatccggtaactgttcacttgagtccaacccggaaaagcacggtaaaacgccactggcagcagccattggtaactgggagttcgcagaggatttgtttagctaaacacgcggttgctcttgaagtgtgcgccaaagtccggctacactggaaggacagatttggttgctgtgctctgcgaaagccagttaccacggttaagcagttccccaactgacttaaccttcgatcaaaccacctccccaggtggttttttcgtttacagggcaaaagattacgcgcagaaaaaaaggatctcaagaagatcctttgatcttttctactgaaccgctctagatttcagtgcaatttatctcttcaaatgtagcacctgaagtcagccccatacgatataagttgtaattctcatgttagtcatgccccgcgcccaccggaaggagctgactgggttgaaggctctcaagggcatcggtcgagatcccggtgcctaatgagtgagctaacttacattaattgcgttgcgctcactgcccgctttccagtcgggaaacctgtcgtgccagctgcattaatgaatcggccaacgcgcggggagaggcggtttgcgtattgggcgccagggtggtttttcttttcaccagtgagacgggcaacagctgattgcccttcaccgcctggccctgagagagttgcagcaagcggtccacgctggtttgccccagcaggcgaaaatcctgtttgatggtggttaacggcgggatataacatgagctgtcttcggtatcgtcgtatcccactaccgagatgtccgcaccaacgcgcagcccggactcggtaatggcgcgcattgcgcccagcgccatctgatcgttggcaaccagcatcgcagtgggaacgatgccctcattcagcatttgcatggtttgttgaaaaccggacatggcactccagtcgccttcccgttccgctatcggctgaatttgattgcgagtgagatatttatgccagccagccagacgcagacgcgccgagacagaacttaatgggcccgctaacagcgcgatttgctggtgacccaatgcgaccagatgctccacgcccagtcgcgtaccgtcttcatgggagaaaataatactgttgatgggtgtctggtcagagacatcaagaaataacgccggaacattagtgcaggcagcttccacagcaatggcatcctggtcatccagcggatagttaatgatcagcccactgacgcgttgcgcgagaagattgtgcaccgccgctttacaggcttcgacgccgcttcgttctaccatcgacaccaccacgctggcacccagttgatcggcgcgagatttaatcgccgcgacaatttgcgacggcgcgtgcagggccagactggaggtggcaacgccaatcagcaacgactgtttgcccgccagttgttgtgccacgcggttgggaatgtaattcagctccgccatcgccgcttccactttttcccgcgttttcgcaga

SEQ ID NO: 31 - DNA, 12828 bp, artificial sequence
  Synthetic
aacgtggctggcctggttcaccacgcgggaaacggtctgataagagacaccggcatactctgcgacatcgtataacgttactggtttcacattcaccaccctgaattgactctcttccgggcgctatcatgccataccgcgaaaggttttgcgccattcgatggtgtccgggatctcgacgctctcccttatgcgactcctgcattaggaatggataaccgtattaccgcctttgagtgagctgataccgctcgccgcagccgaacgaccgagcgcagcgagtcagtgagcgaggacacaagcttttatggctagctcagtcctaggtacaatgctagcgtcgacgtggagatataccatgggtgaactgccgagtaggtagctgataacagtacagcgcggctgaaatcatcattaaagcggtgaactgccgagtaggtagctgataacggatccgaattcgagcgaaggagatatacatatgtttttgcaaagacctaaaccttacagcgatgaaagtttagaaagtttctttatccgagtggctaacaaaaatggctacggtgatgtccatcgcttcctagaagccactaaacgattccttcaagacattgaccataatggctatcaaacctttccgactgatataactcggataaacccatactcagctaaaaacagttccagcgcacgaactgcgtcattcctgaaacttgcacaattgacatttaatgaaccgccagagctacttgggttggcaattaacagaacaaacatgaaatactcgccgtcaactagcgcggttgttagaggtgcagaagtctttcctcgcagtttactacggacgcactccatcccctgctgtcctttgtgtctgcgagaaaatggctacgcctcctacctttggcactttcaggggtacgaatactgccacagccataacgtacctttaattaccacttgtagctgtggtaaggagtttgactaccgagtatctgggttaaagggcatttgctgcaaatgcaaggagcctatcaccttaaccagcagggagaacggtcatgaggcagcgtgtactgtttcaaactggcttgctggccatgaatctaaacctctgccaaatcttcctaaaagctaccgatggggtttagttcattggtggatgggtattaaagatagcgagttcgatcacttttcgttcgttcaatttttctcaaactggccaaggtcattccactcgataatcgaagatgaagtagagttcaaccttgagcatgctgttgtcagcacgtctgaattacgactaaaagatcttcttggtcgattgtttttcggttcaattcggttacctgagcggaatcttcaacacaatatcatccttggtgagcttctctgctatttagaaaatcgtttatggcaagacaagggattaatcgccaacctcaaaatgaacgcgttagaggcgactgtaatgttaaattgtagcctcgatcagattgcatcaatggttgaacaacgcatcttgaagccaaatcgaaaaagcaagcccaacagccctcttgatgttaccgattatctatttcatttcggcgatattttctgtctttggttagctgagttccaaagcgatgagtttaaccgttcgttttatgtgtcgaggtggtaaatgcaaactctgaaagaactaatcgcatccaatcctgacgacttaacaactgaacttaagagagcatttcgtccactcacaccgcatattgcaattgatggtaatgaacttgacgcactgacgatattagtcaatttaaccgataagactgatgatcagaaagacctgctcgatcgagccaaatgcaagcaaaaacttcgagatgaaaaatggtgggctagctgcataaattgcgttaattacagacaaagccataacccaaaattcccggatatacgttctgaaggcgtgattcgaacccaagccctgggtgaattaccgagtttcctactctcgtcctcaaaaatcccaccataccattggtcatatagccatgattcaaaatacgtcaacaaaagcgcattcctcaccaatgagttttgttgggatggtgagatctcatgtttgggtgagcttcttaaagatgcagatcacccactttggaatactttgaaaaagttaggttgttctcaaaaaacttgcaaagcaatggcaaaacaactagctgatattactctcacgactatcaatgtcacactcgcaccaaattacctgactcaaatatctctccccgatagtgatacatcctacatttcactctctcctgttgcatcgctatcgatgcaaagccactttcatcagaggctccaagatgaaaatcggcatagcgcgataacgcggtttagccgaactaccaacatgggggtcactgcgatgacatgtggcggcgcatttagaatgttaaagtctggcgctaagttttccagcccccctcatcaccgattaaacagtaaacgaagttggttgacgtcagagcatgttcagtcattaaaacagtaccagcgcctcaacaaaagcctcatacctgaaaactctcggattgcactccgtagaaaatacaaaatcgagcttcaaaatatggtcagatcttggtttgcaatgcaagaccatacccttgattcgaacatacttatccaacatttgaatcatgacctatcttacttaggagccacaaaacgttttgcatacgatccagcgatgaccaagctctttactgagcttttgaaacgagagttatcaaattcaatcaataatggtgagcaacacactaatggatcgtttttagtcctaccgaatatcagggtttgtggcgcaacagctttaagctccccggtaacggtggggattccatcacttacagctttctttggcttcgttcacgcatttgaacggaatataaatcgcaccacctcatcgtttcgtgttgaatcctttgcgatatgcgtccatcaactacatgtcgagaagcgaggtttgacagcagagtttgtggaaaaaggcgacgggactatatccgctcccgcgacccgggatgactggcagtgtgatgtcgtatttagccttattttgaacaccaactttgctcaacatattgaccaagatacgttagttacatcactaccaaagcgattggctcggggttcagcaaaaattgcgattgatgactttaaacatatcaactcattctcgacattagaaacagcgatcgaatctctgccaatagaagctggtaggtggttatcactttacgcacagtcaaacaataatctaagtgatctattagcagccatgacagaggaccatcagctcatggcaagctgcgtcggttaccacttgttagaagagcccaaagataaaccaaactccctcagaggttacaaacacgctatcgccgagtgcatcattggactcattaactcaatcacctttagctcagagactgatcccaacacaatcttttggtcgctaaagaactatcaaaactacctagtggtacagccaaggagtatcaacgatgaaactaccgacaaatctagcctatgagcgctctatcgacccatcagatgtctgtttttttgtcgtctggcccgatgatagaaaaacacctttaacctacaattctcgtactctgctcgggcaaatggaagcggcatcattagcctatgatgtctcaggtcaaccaataaaaagtgccaccgctgaggcgttagctcaagggaaccctcatcaagttgatttctgccacgttccatacggtgcgagtcatattgaatgcagtttctccgtctcgttttcttctgaactacgtcaaccatataagtgtaactcaagcaaagttaaacaaacgctagtgcaattagtcgagctctacgaaacgaaaatcggctggactgagctagcaacccgatatttgatgaacatttgcaacggtaaatggctgtggaaaaatacccgtaaagcctattgctggaacattgtacttacaccttggccttggaacggggaaaaggttggatttgaagatattcgtactaactacacctcacggcaagactttaaaaataataaaaattggtctgctatagttgaaatgatcaaaaccgcattttctagtactgatgggctggcgatatttgaagtcagggccaccttgcacttgccaacgaatgctatggtgcggccaagccaagttttcacagaaaaagaaagtggcagtaaaagtaaatctaaaactcaaaacagtcgagtttttcagagtacaactattgatggtgaacgatcgccaatactaggggcctttaaaacgggagcagctattgcaaccattgacgactggtatcctgaagccactgagccactaagggtcggacggtttggggttcatcgcgaagatgtcacttgctaccgtcatccgtctaccggaaaagattttttctcgatattacaacaagcagagcactatattgaagtgttgagcgccaacaaaactcccgctcaagaaactatcaacgacatgcactttttaatggctaacctgattaagggtgggatgttccagcataaaggagactgactgtgaaatggtattataagacaatcacctttctgccagagttgtgcaacaacgagtcactggctgcaaagtgtctccgcgttctgcatggatttaactatcagtatgagacacgaaatatcggcgtttcatttccgctttggtgtgatgcaacggttggaaaaaagatttcatttgtcagcaagaacaagatagaactcgacttactacttaaacaacactatttcgtccaaatggaacaacttcaatactttcatatatccaacactgttctcgtcccagaagattgtacatacgtttcctttagacgctgtcaatctatagataagctcacagcagcagggctggcaaggaaaatcagacgcctggagaaacgtgctctatctagaggcgagcaatttgacccatcatcttttgctcaaaaagagcatactgcaatagcgcactaccactcacttggggagtccagcaaacagacgaaccgcaactttcgactcaatatcaggatgctctcggagcaaccccgtgaggggaactcgatttttagtagctatggcttatcaaattcagaaaactcgtttcagcctgtacccttaatctgacctttaataaggagatataccatggcgacaagtttacctacgccctcagcaattacgacttcggcgttagagtatgcattccatactcccgctcgcaatctaacgaaatctcgcggaaaaaacattcatcgttatgtcagtgtaaagatgagtaagaggattacggtagaatctactctagagtgtgatgcctgctatcactttgattttgagccaagtattgttcgcttttgcgctcaaccgattcgatttttatattatctcaatggtcagtctcactcctatgttcctgactttctagttcaatttgataccaacgagtttgttctatatgaagtaaagtcagcttatgctaagaacaaacctgattttgatgttgaatgggaggcgaaagtaaaagcagcaactgaactagggctagaattggagcttgttgaagagagtgatattagggatacggttgtattaaataatcttaagcgcatgcatcgttatgcttcgaaagatgagctgaataacgtacataactctctcttaaaaataataaagtacaatggcgcccaatctgcaagatgcttgggagaacagttgggtttaaaaggccgaactgttttaccaattttgtgcgatttgctgtcaaggtgtttactcgatacacgtttggataagcctctatctcttgaatctcgatttgagttggccagttatggctaagaaagggttctcaagtttccatagaaaagcagtctcttcccaagatacgcttgaatcgatagagcttgtctctagcgctaattgtctagaaagtgttacgtatcaagatatatcagcatttcccgaaacaattgcggtagagattaatttccgattaagcattcttcgctttttagcgcgaaagtgcgaaaccattgtggccaaatcaattgaaccacatcgtgtagagctacagcaaaactatagtagaaaaatacccagtgcaataacgatatatcgatggtggcttgcttttcgaaaatcagactacaaccccattagcttagcacctaatatcaaggatagaggtaatagagagacaaaagtgtcaacagttgttgattctattatggaacaggcagttgaaagagttatatctggacgaaaagtcaatgttagctctgcatataaacgtgttcgacgaaaagttcgtcaatacaatctaactcatggaacgaaatacacgtatcctaagtacgaatctgtaagaaagcgagtaaaaaagaaaaccccatttgagttattagccgcagggaaaggggagagagtagctaagagagagtttcgccgaatgggaaaaaagatcctcacgtctagcgtgctagagagggttgaaatagatcacactgtcgttgacctttttgcagtacacgaagagtatcgaatcccattgggccgaccttggcttactcaattggttgattgttacagtaaagctgtaatcggtttttatttaggtttcgagcctcctagctatgtgtcggtttcccttgcacttaagaatgcaatacaacgcaaagatgacttaatctcctcgtatgaatcgatcgagaatgaatggctatgttatggcatcccagacctactcgtaactgataatggtaaagagtttttgtcgaaagcatttgatcaagcatgtgaatcactattgatcaatgtgcatcaaaataaagttgagacgcccgacaacaaacctcatgttgaacgtaactacgggactattaatacttctctgttagacgatttacctgggaaatccttcagccagtaccttcaaagagaagggtacgactctgtgggagaagctacccttacactcaatgagattagagaaatttacttaatttggttggtggatatttatcataaaaaacccaatcagagaggcactaattgtcctaatgttgcgtggaaaaagggttgtcaagaatgggaaccagaggagttctctggttctaaagacgaattagactttaaatttgctattgttgattacaaacaacttactaaagtagggataactgtctacaaagaactgagttatagcaatgaccgtttagctgaatatagagggaagaaaggaaaccataaagttcagttcaagtataaccctgagtgtatggcagttatttgggtgttggatgaggatatgaatgagtactttacagttaatgcgattgactacgaatatgcaagtagagtatcactttggcaacataaatataacatgaaatatcaagcagaactaaattcagcagaatatgatgaggacaaggaaattgatgcagaaataaaaattgaagaaatcgcagatcgttcaattgttaagactaacaaaatcagagctcggaggcgtggcgctaggcatcaagagaatagcgcaagggctaagtcaatcagtaatgcgaacccggcctcgatacaaaaacatgaagatgaaatcgttagtgcagataatgacgattgggatattgattatgtctgagaaatcgtcaaatgagtgaaacgcgtgaggctcgtatatcaagagctaaaagggcatttgtatccacaccgagcgttaggaaaatcttgagttacatggatagatgtagagatctatcagacctagagtctgagcctacatgcatgatggtctatggtgcttcgggtgtaggtaaaacgaccgtcatcaagaaatacttaaatcaaaacagaagagagtccgaagccgggggcgatataataccggttttgcatattgagttgccagacaatgcgaagccagtagatgcagcaagggaattgctggttgaaatgggtgacccgctagcactttatgaaactgacttagctagattgacgaaaagactgactgaattaatccctgcggtcggcgtgaagctgattattatcgatgagttccaacatttggtggaagaaaggtcaaatcgggttcttacccaagtaggtaattggctaaaaatgatacttaacaaaacgaaatgtccaattgttatatttggtatgccatactcaaaagttgtactgcaagcaaactcgcaacttcacgggcgattttccattcaggttgaactgcgcccctttagctaccagggaggtagaggtgtatttaaaacttttttggaataccttgataaagccctaccttttgaaaaacaggctggcttagccaacgaaagtttgcagaaaaaattgtatgcattctctcagggaaacatgcgttcgttgagaaaccttatttatcaagcatctatcgaagcaattgataatcagcatgagacgataaccgaagaagatttcgtttttgcatcgaagttgacatcgggcgataaacccaactcatggaaaaatccttttgaggagggtgttgaggtaacagaagatatgttacgaccgccaccaaaagatattggttgggaggactatttgagacattcaaccccgagagtgagtaaaccaggtagaaataaaaactttttcgaataacctaggctgctgcgctgctgccaccgctgagcaataactagcataaccccttggggcctctaaacgggtcttgaggggttttttgctgaaacctcaggcatttgttgttgatacaaccataaaatgataattacacccataaattgataattatcacacccataaattgatattgcctcttcatggtctaaacttcagtaagtttacgacattttcctcgaggtcatttccggggatccatggagaaaaaaatcactggatataccaccgttgatatatcccaatggcatcgtaaagaacattttgaggcatttcagtcagttgctcaatgtacctataaccagaccgttcagctggatattacggcctttttaaagaccgtaaagaaaaataagcacaagttttatccggcctttattcacattcttgcccgcctgatgaatgctcatccggagttccgtatggcaatgaaagacggtgagctggtgatatgggatagtgttcacccttgttacaccgttttccatgagcaaactgaaacgttttcatcgctctggagtgaataccacgacgatttccggcagtttctacacatatattcgcaagatgtggcgtgttacggtgaaaacctggcctatttccctaaagggtttattgagaatatgtttttcgtctcagccaatccctgggtgagtttcaccagttttgatttaaacgtggccaatatggacaacttcttcgcccccgttttcactatgggcaaatattatacgcaaggcgacaaggtgctgatgccgctggcgattcaggttcatcatgccgtttgtgatggcttccatgtcggcagaatgcttaatgaattacaacagtactgcgatgagtggcagggcggggcgtaatttttttaaggcagttattggtgcccttctagagtccttactgcagtagttttgctgaaatactcgattcacaaaaatatcaacttatggttgttttgtgagatatcaatatatggttgttttgtggttaagttgctgattataaataattattaaatatcactttatggttgcatcaacaggtaccgagctcgaattcactggccgtcgttttacaacgtcgtgactgggaaaaccctggcgttacccaacttaatcgccttgctatcgtggccggatcttgcggcccctcggcttgaacgaattgttagacattatttgccgactaccttggtgatctcgcctttcacgtagtggacaaattcttccaactgatctgcgcgcgaggccaagcgatcttcttcttgtccaagataagcctgtctagcttcaagtatgacgggctgatactgggccggcaggcgctccattgcccagtcggcagcgacatccttcggcgcgattttgccggttactgcgctgtaccaaatgcgggacaacgtaagcactacatttcgctcatcgccagcccagtcgggcggcgagttccatagcgttaaggtttcatttagcgcctcaaatagatcctgttcaggaaccggatcaaagagttcctccgccgctggacctaccaaggcaacgctatgttctcttgcttttgtcagcaagatagccagatcaatgtcgatcgtggctggctcgaagatacctgcaagaatgtcattgcgctgccattctccaaattgcagttcgcgcttagctggataacgccacggaatgatgtcgtcgtgcacaacaatggtgacttctacagcgcggagaatctcgctctctccaggggaagccgaagtttccaaaaggtcgttgatcaaagctcgccgcgttgtttcatcaagccttacggtcaccgtaaccagcaaatcaatatcactgtgtggcttcaggccgccatccactgcggagccgtacaaatgtacggccagcaacgtcggttcgagatggcgctcgatgacgccaactacctctgatagttgagtcgatacttcggcgatcaccgcttccctcatactcttcctttttcaatattattgaagcatttatcagggttattgtctcatgagcggatacatatttgaatgtatttagaaaaataaacaaatagctagctcactcggtcgctacgctccgggcgtgagactgcggcgggcgctgcggacacatacaaagttacccacagattccgtggataagcaggggactaacatgtgaggcaaaacagcagggccgcgccggtggcgtttttccataggctccgccctcctgccagagttcacataaacagacgcttttccggtgcatctgtgggagccgtgaggctcaaccatgaatctgacagtacgggcgaaacccgacaggacttaaagatccccaccgtttccggcgggtcgctccctcttgcgctctcctgttccgaccctgccgtttaccggatacctgttccgcctttctcccttacgggaagtgtggcgctttctcatagctcacacactggtatctcggctcggtgtaggtcgttcgctccaagctgggctgtaagcaagaactccccgttcagcccgactgctgcgccttatccggtaactgttcacttgagtccaacccggaaaagcacggtaaaacgccactggcagcagccattggtaactgggagttcgcagaggatttgtttagctaaacacgcggttgctcttgaagtgtgcgccaaagtccggctacactggaaggacagatttggttgctgtgctctgcgaaagccagttaccacggttaagcagttccccaactgacttaaccttcgatcaaaccacctccccaggtggttttttcgtttacagggcaaaagattacgcgcagaaaaaaaggatctcaagaagatcctttgatcttttctactgaaccgctctagatttcagtgcaatttatctcttcaaatgtagcacctgaagtcagccccatacgatataagttgtaattctcatgttagtcatgccccgcgcccaccggaaggagctgactgggttgaaggctctcaagggcatcggtcgagatcccggtgcctaatgagtgagctaacttacattaattgcgttgcgctcactgcccgctttccagtcgggaaacctgtcgtgccagctgcattaatgaatcggccaacgcgcggggagaggcggtttgcgtattgggcgccagggtggtttttcttttcaccagtgagacgggcaacagctgattgcccttcaccgcctggccctgagagagttgcagcaagcggtccacgctggtttgccccagcaggcgaaaatcctgtttgatggtggttaacggcgggatataacatgagctgtcttcggtatcgtcgtatcccactaccgagatgtccgcaccaacgcgcagcccggactcggtaatggcgcgcattgcgcccagcgccatctgatcgttggcaaccagcatcgcagtgggaacgatgccctcattcagcatttgcatggtttgttgaaaaccggacatggcactccagtcgccttcccgttccgctatcggctgaatttgattgcgagtgagatatttatgccagccagccagacgcagacgcgccgagacagaacttaatgggcccgctaacagcgcgatttgctggtgacccaatgcgaccagatgctccacgcccagtcgcgtaccgtcttcatgggagaaaataatactgttgatgggtgtctggtcagagacatcaagaaataacgccggaacattagtgcaggcagcttccacagcaatggcatcctggtcatccagcggatagttaatgatcagcccactgacgcgttgcgcgagaagattgtgcaccgccgctttacaggcttcgacgccgcttcgttctaccatcgacaccaccacgctggcacccagttgatcggcgcgagatttaatcgccgcgacaatttgcgacggcgcgtgcagggccagactggaggtggcaacgccaatcagcaacgactgtttgcccgccagttgttgtgccacgcggttgggaatgtaattcagctccgccatcgccgcttccactttttcccgcgttttcgcaga

SEQ ID NO: 32 - DNA, 12825 bp, artificial sequence
  Synthetic
aacgtggctggcctggttcaccacgcgggaaacggtctgataagagacaccggcatactctgcgacatcgtataacgttactggtttcacattcaccaccctgaattgactctcttccgggcgctatcatgccataccgcgaaaggttttgcgccattcgatggtgtccgggatctcgacgctctcccttatgcgactcctgcattaggaatggataaccgtattaccgcctttgagtgagctgataccgctcgccgcagccgaacgaccgagcgcagcgagtcagtgagcgaggacacaagcttttacactttatgcttccggctcgtatgttgtgtcgacgtggagatataccatgggtgaactgccgagtaggtagctgataacagtacagcgcggctgaaatcatcattaaagcggtgaactgccgagtaggtagctgataacggatccgaattcgagcgaaggagatatacatatgtttttgcaaagacctaaaccttacagcgatgaaagtttagaaagtttctttatccgagtggctaacaaaaatggctacggtgatgtccatcgcttcctagaagccactaaacgattccttcaagacattgaccataatggctatcaaacctttccgactgatataactcggataaacccatactcagctaaaaacagttccagcgcacgaactgcgtcattcctgaaacttgcacaattgacatttaatgaaccgccagagctacttgggttggcaattaacagaacaaacatgaaatactcgccgtcaactagcgcggttgttagaggtgcagaagtctttcctcgcagtttactacggacgcactccatcccctgctgtcctttgtgtctgcgagaaaatggctacgcctcctacctttggcactttcaggggtacgaatactgccacagccataacgtacctttaattaccacttgtagctgtggtaaggagtttgactaccgagtatctgggttaaagggcatttgctgcaaatgcaaggagcctatcaccttaaccagcagggagaacggtcatgaggcagcgtgtactgtttcaaactggcttgctggccatgaatctaaacctctgccaaatcttcctaaaagctaccgatggggtttagttcattggtggatgggtattaaagatagcgagttcgatcacttttcgttcgttcaatttttctcaaactggccaaggtcattccactcgataatcgaagatgaagtagagttcaaccttgagcatgctgttgtcagcacgtctgaattacgactaaaagatcttcttggtcgattgtttttcggttcaattcggttacctgagcggaatcttcaacacaatatcatccttggtgagcttctctgctatttagaaaatcgtttatggcaagacaagggattaatcgccaacctcaaaatgaacgcgttagaggcgactgtaatgttaaattgtagcctcgatcagattgcatcaatggttgaacaacgcatcttgaagccaaatcgaaaaagcaagcccaacagccctcttgatgttaccgattatctatttcatttcggcgatattttctgtctttggttagctgagttccaaagcgatgagtttaaccgttcgttttatgtgtcgaggtggtaaatgcaaactctgaaagaactaatcgcatccaatcctgacgacttaacaactgaacttaagagagcatttcgtccactcacaccgcatattgcaattgatggtaatgaacttgacgcactgacgatattagtcaatttaaccgataagactgatgatcagaaagacctgctcgatcgagccaaatgcaagcaaaaacttcgagatgaaaaatggtgggctagctgcataaattgcgttaattacagacaaagccataacccaaaattcccggatatacgttctgaaggcgtgattcgaacccaagccctgggtgaattaccgagtttcctactctcgtcctcaaaaatcccaccataccattggtcatatagccatgattcaaaatacgtcaacaaaagcgcattcctcaccaatgagttttgttgggatggtgagatctcatgtttgggtgagcttcttaaagatgcagatcacccactttggaatactttgaaaaagttaggttgttctcaaaaaacttgcaaagcaatggcaaaacaactagctgatattactctcacgactatcaatgtcacactcgcaccaaattacctgactcaaatatctctccccgatagtgatacatcctacatttcactctctcctgttgcatcgctatcgatgcaaagccactttcatcagaggctccaagatgaaaatcggcatagcgcgataacgcggtttagccgaactaccaacatgggggtcactgcgatgacatgtggcggcgcatttagaatgttaaagtctggcgctaagttttccagcccccctcatcaccgattaaacagtaaacgaagttggttgacgtcagagcatgttcagtcattaaaacagtaccagcgcctcaacaaaagcctcatacctgaaaactctcggattgcactccgtagaaaatacaaaatcgagcttcaaaatatggtcagatcttggtttgcaatgcaagaccatacccttgattcgaacatacttatccaacatttgaatcatgacctatcttacttaggagccacaaaacgttttgcatacgatccagcgatgaccaagctctttactgagcttttgaaacgagagttatcaaattcaatcaataatggtgagcaacacactaatggatcgtttttagtcctaccgaatatcagggtttgtggcgcaacagctttaagctccccggtaacggtggggattccatcacttacagctttctttggcttcgttcacgcatttgaacggaatataaatcgcaccacctcatcgtttcgtgttgaatcctttgcgatatgcgtccatcaactacatgtcgagaagcgaggtttgacagcagagtttgtggaaaaaggcgacgggactatatccgctcccgcgacccgggatgactggcagtgtgatgtcgtatttagccttattttgaacaccaactttgctcaacatattgaccaagatacgttagttacatcactaccaaagcgattggctcggggttcagcaaaaattgcgattgatgactttaaacatatcaactcattctcgacattagaaacagcgatcgaatctctgccaatagaagctggtaggtggttatcactttacgcacagtcaaacaataatctaagtgatctattagcagccatgacagaggaccatcagctcatggcaagctgcgtcggttaccacttgttagaagagcccaaagataaaccaaactccctcagaggttacaaacacgctatcgccgagtgcatcattggactcattaactcaatcacctttagctcagagactgatcccaacacaatcttttggtcgctaaagaactatcaaaactacctagtggtacagccaaggagtatcaacgatgaaactaccgacaaatctagcctatgagcgctctatcgacccatcagatgtctgtttttttgtcgtctggcccgatgatagaaaaacacctttaacctacaattctcgtactctgctcgggcaaatggaagcggcatcattagcctatgatgtctcaggtcaaccaataaaaagtgccaccgctgaggcgttagctcaagggaaccctcatcaagttgatttctgccacgttccatacggtgcgagtcatattgaatgcagtttctccgtctcgttttcttctgaactacgtcaaccatataagtgtaactcaagcaaagttaaacaaacgctagtgcaattagtcgagctctacgaaacgaaaatcggctggactgagctagcaacccgatatttgatgaacatttgcaacggtaaatggctgtggaaaaatacccgtaaagcctattgctggaacattgtacttacaccttggccttggaacggggaaaaggttggatttgaagatattcgtactaactacacctcacggcaagactttaaaaataataaaaattggtctgctatagttgaaatgatcaaaaccgcattttctagtactgatgggctggcgatatttgaagtcagggccaccttgcacttgccaacgaatgctatggtgcggccaagccaagttttcacagaaaaagaaagtggcagtaaaagtaaatctaaaactcaaaacagtcgagtttttcagagtacaactattgatggtgaacgatcgccaatactaggggcctttaaaacgggagcagctattgcaaccattgacgactggtatcctgaagccactgagccactaagggtcggacggtttggggttcatcgcgaagatgtcacttgctaccgtcatccgtctaccggaaaagattttttctcgatattacaacaagcagagcactatattgaagtgttgagcgccaacaaaactcccgctcaagaaactatcaacgacatgcactttttaatggctaacctgattaagggtgggatgttccagcataaaggagactgactgtgaaatggtattataagacaatcacctttctgccagagttgtgcaacaacgagtcactggctgcaaagtgtctccgcgttctgcatggatttaactatcagtatgagacacgaaatatcggcgtttcatttccgctttggtgtgatgcaacggttggaaaaaagatttcatttgtcagcaagaacaagatagaactcgacttactacttaaacaacactatttcgtccaaatggaacaacttcaatactttcatatatccaacactgttctcgtcccagaagattgtacatacgtttcctttagacgctgtcaatctatagataagctcacagcagcagggctggcaaggaaaatcagacgcctggagaaacgtgctctatctagaggcgagcaatttgacccatcatcttttgctcaaaaagagcatactgcaatagcgcactaccactcacttggggagtccagcaaacagacgaaccgcaactttcgactcaatatcaggatgctctcggagcaaccccgtgaggggaactcgatttttagtagctatggcttatcaaattcagaaaactcgtttcagcctgtacccttaatctgacctttaataaggagatataccatggcgacaagtttacctacgccctcagcaattacgacttcggcgttagagtatgcattccatactcccgctcgcaatctaacgaaatctcgcggaaaaaacattcatcgttatgtcagtgtaaagatgagtaagaggattacggtagaatctactctagagtgtgatgcctgctatcactttgattttgagccaagtattgttcgcttttgcgctcaaccgattcgatttttatattatctcaatggtcagtctcactcctatgttcctgactttctagttcaatttgataccaacgagtttgttctatatgaagtaaagtcagcttatgctaagaacaaacctgattttgatgttgaatgggaggcgaaagtaaaagcagcaactgaactagggctagaattggagcttgttgaagagagtgatattagggatacggttgtattaaataatcttaagcgcatgcatcgttatgcttcgaaagatgagctgaataacgtacataactctctcttaaaaataataaagtacaatggcgcccaatctgcaagatgcttgggagaacagttgggtttaaaaggccgaactgttttaccaattttgtgcgatttgctgtcaaggtgtttactcgatacacgtttggataagcctctatctcttgaatctcgatttgagttggccagttatggctaagaaagggttctcaagtttccatagaaaagcagtctcttcccaagatacgcttgaatcgatagagcttgtctctagcgctaattgtctagaaagtgttacgtatcaagatatatcagcatttcccgaaacaattgcggtagagattaatttccgattaagcattcttcgctttttagcgcgaaagtgcgaaaccattgtggccaaatcaattgaaccacatcgtgtagagctacagcaaaactatagtagaaaaatacccagtgcaataacgatatatcgatggtggcttgcttttcgaaaatcagactacaaccccattagcttagcacctaatatcaaggatagaggtaatagagagacaaaagtgtcaacagttgttgattctattatggaacaggcagttgaaagagttatatctggacgaaaagtcaatgttagctctgcatataaacgtgttcgacgaaaagttcgtcaatacaatctaactcatggaacgaaatacacgtatcctaagtacgaatctgtaagaaagcgagtaaaaaagaaaaccccatttgagttattagccgcagggaaaggggagagagtagctaagagagagtttcgccgaatgggaaaaaagatcctcacgtctagcgtgctagagagggttgaaatagatcacactgtcgttgacctttttgcagtacacgaagagtatcgaatcccattgggccgaccttggcttactcaattggttgattgttacagtaaagctgtaatcggtttttatttaggtttcgagcctcctagctatgtgtcggtttcccttgcacttaagaatgcaatacaacgcaaagatgacttaatctcctcgtatgaatcgatcgagaatgaatggctatgttatggcatcccagacctactcgtaactgataatggtaaagagtttttgtcgaaagcatttgatcaagcatgtgaatcactattgatcaatgtgcatcaaaataaagttgagacgcccgacaacaaacctcatgttgaacgtaactacgggactattaatacttctctgttagacgatttacctgggaaatccttcagccagtaccttcaaagagaagggtacgactctgtgggagaagctacccttacactcaatgagattagagaaatttacttaatttggttggtggatatttatcataaaaaacccaatcagagaggcactaattgtcctaatgttgcgtggaaaaagggttgtcaagaatgggaaccagaggagttctctggttctaaagacgaattagactttaaatttgctattgttgattacaaacaacttactaaagtagggataactgtctacaaagaactgagttatagcaatgaccgtttagctgaatatagagggaagaaaggaaaccataaagttcagttcaagtataaccctgagtgtatggcagttatttgggtgttggatgaggatatgaatgagtactttacagttaatgcgattgactacgaatatgcaagtagagtatcactttggcaacataaatataacatgaaatatcaagcagaactaaattcagcagaatatgatgaggacaaggaaattgatgcagaaataaaaattgaagaaatcgcagatcgttcaattgttaagactaacaaaatcagagctcggaggcgtggcgctaggcatcaagagaatagcgcaagggctaagtcaatcagtaatgcgaacccggcctcgatacaaaaacatgaagatgaaatcgttagtgcagataatgacgattgggatattgattatgtctgagaaatcgtcaaatgagtgaaacgcgtgaggctcgtatatcaagagctaaaagggcatttgtatccacaccgagcgttaggaaaatcttgagttacatggatagatgtagagatctatcagacctagagtctgagcctacatgcatgatggtctatggtgcttcgggtgtaggtaaaacgaccgtcatcaagaaatacttaaatcaaaacagaagagagtccgaagccgggggcgatataataccggttttgcatattgagttgccagacaatgcgaagccagtagatgcagcaagggaattgctggttgaaatgggtgacccgctagcactttatgaaactgacttagctagattgacgaaaagactgactgaattaatccctgcggtcggcgtgaagctgattattatcgatgagttccaacatttggtggaagaaaggtcaaatcgggttcttacccaagtaggtaattggctaaaaatgatacttaacaaaacgaaatgtccaattgttatatttggtatgccatactcaaaagttgtactgcaagcaaactcgcaacttcacgggcgattttccattcaggttgaactgcgcccctttagctaccagggaggtagaggtgtatttaaaacttttttggaataccttgataaagccctaccttttgaaaaacaggctggcttagccaacgaaagtttgcagaaaaaattgtatgcattctctcagggaaacatgcgttcgttgagaaaccttatttatcaagcatctatcgaagcaattgataatcagcatgagacgataaccgaagaagatttcgtttttgcatcgaagttgacatcgggcgataaacccaactcatggaaaaatccttttgaggagggtgttgaggtaacagaagatatgttacgaccgccaccaaaagatattggttgggaggactatttgagacattcaaccccgagagtgagtaaaccaggtagaaataaaaactttttcgaataacctaggctgctgcgctgctgccaccgctgagcaataactagcataaccccttggggcctctaaacgggtcttgaggggttttttgctgaaacctcaggcatttgttgttgatacaaccataaaatgataattacacccataaattgataattatcacacccataaattgatattgcctcttcatggtctaaacttcagtaagtttacgacattttcctcgaggtcatttccggggatccatggagaaaaaaatcactggatataccaccgttgatatatcccaatggcatcgtaaagaacattttgaggcatttcagtcagttgctcaatgtacctataaccagaccgttcagctggatattacggcctttttaaagaccgtaaagaaaaataagcacaagttttatccggcctttattcacattcttgcccgcctgatgaatgctcatccggagttccgtatggcaatgaaagacggtgagctggtgatatgggatagtgttcacccttgttacaccgttttccatgagcaaactgaaacgttttcatcgctctggagtgaataccacgacgatttccggcagtttctacacatatattcgcaagatgtggcgtgttacggtgaaaacctggcctatttccctaaagggtttattgagaatatgtttttcgtctcagccaatccctgggtgagtttcaccagttttgatttaaacgtggccaatatggacaacttcttcgcccccgttttcactatgggcaaatattatacgcaaggcgacaaggtgctgatgccgctggcgattcaggttcatcatgccgtttgtgatggcttccatgtcggcagaatgcttaatgaattacaacagtactgcgatgagtggcagggcggggcgtaatttttttaaggcagttattggtgcccttctagagtccttactgcagtagttttgctgaaatactcgattcacaaaaatatcaacttatggttgttttgtgagatatcaatatatggttgttttgtggttaagttgctgattataaataattattaaatatcactttatggttgcatcaacaggtaccgagctcgaattcactggccgtcgttttacaacgtcgtgactgggaaaaccctggcgttacccaacttaatcgccttgctatcgtggccggatcttgcggcccctcggcttgaacgaattgttagacattatttgccgactaccttggtgatctcgcctttcacgtagtggacaaattcttccaactgatctgcgcgcgaggccaagcgatcttcttcttgtccaagataagcctgtctagcttcaagtatgacgggctgatactgggccggcaggcgctccattgcccagtcggcagcgacatccttcggcgcgattttgccggttactgcgctgtaccaaatgcgggacaacgtaagcactacatttcgctcatcgccagcccagtcgggcggcgagttccatagcgttaaggtttcatttagcgcctcaaatagatcctgttcaggaaccggatcaaagagttcctccgccgctggacctaccaaggcaacgctatgttctcttgcttttgtcagcaagatagccagatcaatgtcgatcgtggctggctcgaagatacctgcaagaatgtcattgcgctgccattctccaaattgcagttcgcgcttagctggataacgccacggaatgatgtcgtcgtgcacaacaatggtgacttctacagcgcggagaatctcgctctctccaggggaagccgaagtttccaaaaggtcgttgatcaaagctcgccgcgttgtttcatcaagccttacggtcaccgtaaccagcaaatcaatatcactgtgtggcttcaggccgccatccactgcggagccgtacaaatgtacggccagcaacgtcggttcgagatggcgctcgatgacgccaactacctctgatagttgagtcgatacttcggcgatcaccgcttccctcatactcttcctttttcaatattattgaagcatttatcagggttattgtctcatgagcggatacatatttgaatgtatttagaaaaataaacaaatagctagctcactcggtcgctacgctccgggcgtgagactgcggcgggcgctgcggacacatacaaagttacccacagattccgtggataagcaggggactaacatgtgaggcaaaacagcagggccgcgccggtggcgtttttccataggctccgccctcctgccagagttcacataaacagacgcttttccggtgcatctgtgggagccgtgaggctcaaccatgaatctgacagtacgggcgaaacccgacaggacttaaagatccccaccgtttccggcgggtcgctccctcttgcgctctcctgttccgaccctgccgtttaccggatacctgttccgcctttctcccttacgggaagtgtggcgctttctcatagctcacacactggtatctcggctcggtgtaggtcgttcgctccaagctgggctgtaagcaagaactccccgttcagcccgactgctgcgccttatccggtaactgttcacttgagtccaacccggaaaagcacggtaaaacgccactggcagcagccattggtaactgggagttcgcagaggatttgtttagctaaacacgcggttgctcttgaagtgtgcgccaaagtccggctacactggaaggacagatttggttgctgtgctctgcgaaagccagttaccacggttaagcagttccccaactgacttaaccttcgatcaaaccacctccccaggtggttttttcgtttacagggcaaaagattacgcgcagaaaaaaaggatctcaagaagatcctttgatcttttctactgaaccgctctagatttcagtgcaatttatctcttcaaatgtagcacctgaagtcagccccatacgatataagttgtaattctcatgttagtcatgccccgcgcccaccggaaggagctgactgggttgaaggctctcaagggcatcggtcgagatcccggtgcctaatgagtgagctaacttacattaattgcgttgcgctcactgcccgctttccagtcgggaaacctgtcgtgccagctgcattaatgaatcggccaacgcgcggggagaggcggtttgcgtattgggcgccagggtggtttttcttttcaccagtgagacgggcaacagctgattgcccttcaccgcctggccctgagagagttgcagcaagcggtccacgctggtttgccccagcaggcgaaaatcctgtttgatggtggttaacggcgggatataacatgagctgtcttcggtatcgtcgtatcccactaccgagatgtccgcaccaacgcgcagcccggactcggtaatggcgcgcattgcgcccagcgccatctgatcgttggcaaccagcatcgcagtgggaacgatgccctcattcagcatttgcatggtttgttgaaaaccggacatggcactccagtcgccttcccgttccgctatcggctgaatttgattgcgagtgagatatttatgccagccagccagacgcagacgcgccgagacagaacttaatgggcccgctaacagcgcgatttgctggtgacccaatgcgaccagatgctccacgcccagtcgcgtaccgtcttcatgggagaaaataatactgttgatgggtgtctggtcagagacatcaagaaataacgccggaacattagtgcaggcagcttccacagcaatggcatcctggtcatccagcggatagttaatgatcagcccactgacgcgttgcgcgagaagattgtgcaccgccgctttacaggcttcgacgccgcttcgttctaccatcgacaccaccacgctggcacccagttgatcggcgcgagatttaatcgccgcgacaatttgcgacggcgcgtgcagggccagactggaggtggcaacgccaatcagcaacgactgtttgcccgccagttgttgtgccacgcggttgggaatgtaattcagctccgccatcgccgcttccactttttcccgcgttttcgcaga

SEQ ID NO: 33 - DNA, 12949 bp, artificial sequence
  Synthetic
aacgtggctggcctggttcaccacgcgggaaacggtctgataagagacaccggcatactctgcgacatcgtataacgttactggtttcacattcaccaccctgaattgactctcttccgggcgctatcatgccataccgcgaaaggttttgcgccattcgatggtgtccgggatctcgacgctctcccttatgcgactcctgcattaggaatggataaccgtattaccgcctttgagtgagctgataccgctcgccgcagccgaactaccgagcgcagcgagtcagtgagcgaggacacagcggattgcattaggttttagtttcttgtataatgcttaatgttggtcactgacaggctacgatacggaaggttgctcacgcccggcccctttgccatggctagtgtgtggaaatttccgaggagcaagtctatttccaaaaatgggcgaaaaaggaggtaatacagtggagatataccatgggtgaactgccgagtaggtagctgataacagtacagcgcggctgaaatcatcattaaagcggtgaactgccgagtaggtagctgataacggatccgaattcgagcgaaggagatatacatatgtttttgcaaagacctaaaccttacagcgatgaaagtttagaaagtttctttatccgagtggctaacaaaaatggctacggtgatgtccatcgcttcctagaagccactaaacgattccttcaagacattgaccataatggctatcaaacctttccgactgatataactcggataaacccatactcagctaaaaacagttccagcgcacgaactgcgtcattcctgaaacttgcacaattgacatttaatgaaccgccagagctacttgggttggcaattaacagaacaaacatgaaatactcgccgtcaactagcgcggttgttagaggtgcagaagtctttcctcgcagtttactacggacgcactccatcccctgctgtcctttgtgtctgcgagaaaatggctacgcctcctacctttggcactttcaggggtacgaatactgccacagccataacgtacctttaattaccacttgtagctgtggtaaggagtttgactaccgagtatctgggttaaagggcatttgctgcaaatgcaaggagcctatcaccttaaccagcagggagaacggtcatgaggcagcgtgtactgtttcaaactggcttgctggccatgaatctaaacctctgccaaatcttcctaaaagctaccgatggggtttagttcattggtggatgggtattaaagatagcgagttcgatcacttttcgttcgttcaatttttctcaaactggccaaggtcattccactcgataatcgaagatgaagtagagttcaaccttgagcatgctgttgtcagcacgtctgaattacgactaaaagatcttcttggtcgattgtttttcggttcaattcggttacctgagcggaatcttcaacacaatatcatccttggtgagcttctctgctatttagaaaatcgtttatggcaagacaagggattaatcgccaacctcaaaatgaacgcgttagaggcgactgtaatgttaaattgtagcctcgatcagattgcatcaatggttgaacaacgcatcttgaagccaaatcgaaaaagcaagcccaacagccctcttgatgttaccgattatctatttcatttcggcgatattttctgtctttggttagctgagttccaaagcgatgagtttaaccgttcgttttatgtgtcgaggtggtaaatgcaaactctgaaagaactaatcgcatccaatcctgacgacttaacaactgaacttaagagagcatttcgtccactcacaccgcatattgcaattgatggtaatgaacttgacgcactgacgatattagtcaatttaaccgataagactgatgatcagaaagacctgctcgatcgagccaaatgcaagcaaaaacttcgagatgaaaaatggtgggctagctgcataaattgcgttaattacagacaaagccataacccaaaattcccggatatacgttctgaaggcgtgattcgaacccaagccctgggtgaattaccgagtttcctactctcgtcctcaaaaatcccaccataccattggtcatatagccatgattcaaaatacgtcaacaaaagcgcattcctcaccaatgagttttgttgggatggtgagatctcatgtttgggtgagcttcttaaagatgcagatcacccactttggaatactttgaaaaagttaggttgttctcaaaaaacttgcaaagcaatggcaaaacaactagctgatattactctcacgactatcaatgtcacactcgcaccaaattacctgactcaaatatctctccccgatagtgatacatcctacatttcactctctcctgttgcatcgctatcgatgcaaagccactttcatcagaggctccaagatgaaaatcggcatagcgcgataacgcggtttagccgaactaccaacatgggggtcactgcgatgacatgtggcggcgcatttagaatgttaaagtctggcgctaagttttccagcccccctcatcaccgattaaacagtaaacgaagttggttgacgtcagagcatgttcagtcattaaaacagtaccagcgcctcaacaaaagcctcatacctgaaaactctcggattgcactccgtagaaaatacaaaatcgagcttcaaaatatggtcagatcttggtttgcaatgcaagaccatacccttgattcgaacatacttatccaacatttgaatcatgacctatcttacttaggagccacaaaacgttttgcatacgatccagcgatgaccaagctctttactgagcttttgaaacgagagttatcaaattcaatcaataatggtgagcaacacactaatggatcgtttttagtcctaccgaatatcagggtttgtggcgcaacagctttaagctccccggtaacggtggggattccatcacttacagctttctttggcttcgttcacgcatttgaacggaatataaatcgcaccacctcatcgtttcgtgttgaatcctttgcgatatgcgtccatcaactacatgtcgagaagcgaggtttgacagcagagtttgtggaaaaaggcgacgggactatatccgctcccgcgacccgggatgactggcagtgtgatgtcgtatttagccttattttgaacaccaactttgctcaacatattgaccaagatacgttagttacatcactaccaaagcgattggctcggggttcagcaaaaattgcgattgatgactttaaacatatcaactcattctcgacattagaaacagcgatcgaatctctgccaatagaagctggtaggtggttatcactttacgcacagtcaaacaataatctaagtgatctattagcagccatgacagaggaccatcagctcatggcaagctgcgtcggttaccacttgttagaagagcccaaagataaaccaaactccctcagaggttacaaacacgctatcgccgagtgcatcattggactcattaactcaatcacctttagctcagagactgatcccaacacaatcttttggtcgctaaagaactatcaaaactacctagtggtacagccaaggagtatcaacgatgaaactaccgacaaatctagcctatgagcgctctatcgacccatcagatgtctgtttttttgtcgtctggcccgatgatagaaaaacacctttaacctacaattctcgtactctgctcgggcaaatggaagcggcatcattagcctatgatgtctcaggtcaaccaataaaaagtgccaccgctgaggcgttagctcaagggaaccctcatcaagttgatttctgccacgttccatacggtgcgagtcatattgaatgcagtttctccgtctcgttttcttctgaactacgtcaaccatataagtgtaactcaagcaaagttaaacaaacgctagtgcaattagtcgagctctacgaaacgaaaatcggctggactgagctagcaacccgatatttgatgaacatttgcaacggtaaatggctgtggaaaaatacccgtaaagcctattgctggaacattgtacttacaccttggccttggaacggggaaaaggttggatttgaagatattcgtactaactacacctcacggcaagactttaaaaataataaaaattggtctgctatagttgaaatgatcaaaaccgcattttctagtactgatgggctggcgatatttgaagtcagggccaccttgcacttgccaacgaatgctatggtgcggccaagccaagttttcacagaaaaagaaagtggcagtaaaagtaaatctaaaactcaaaacagtcgagtttttcagagtacaactattgatggtgaacgatcgccaatactaggggcctttaaaacgggagcagctattgcaaccattgacgactggtatcctgaagccactgagccactaagggtcggacggtttggggttcatcgcgaagatgtcacttgctaccgtcatccgtctaccggaaaagattttttctcgatattacaacaagcagagcactatattgaagtgttgagcgccaacaaaactcccgctcaagaaactatcaacgacatgcactttttaatggctaacctgattaagggtgggatgttccagcataaaggagactgactgtgaaatggtattataagacaatcacctttctgccagagttgtgcaacaacgagtcactggctgcaaagtgtctccgcgttctgcatggatttaactatcagtatgagacacgaaatatcggcgtttcatttccgctttggtgtgatgcaacggttggaaaaaagatttcatttgtcagcaagaacaagatagaactcgacttactacttaaacaacactatttcgtccaaatggaacaacttcaatactttcatatatccaacactgttctcgtcccagaagattgtacatacgtttcctttagacgctgtcaatctatagataagctcacagcagcagggctggcaaggaaaatcagacgcctggagaaacgtgctctatctagaggcgagcaatttgacccatcatcttttgctcaaaaagagcatactgcaatagcgcactaccactcacttggggagtccagcaaacagacgaaccgcaactttcgactcaatatcaggatgctctcggagcaaccccgtgaggggaactcgatttttagtagctatggcttatcaaattcagaaaactcgtttcagcctgtacccttaatctgacctttaataaggagatataccatggcgacaagtttacctacgccctcagcaattacgacttcggcgttagagtatgcattccatactcccgctcgcaatctaacgaaatctcgcggaaaaaacattcatcgttatgtcagtgtaaagatgagtaagaggattacggtagaatctactctagagtgtgatgcctgctatcactttgattttgagccaagtattgttcgcttttgcgctcaaccgattcgatttttatattatctcaatggtcagtctcactcctatgttcctgactttctagttcaatttgataccaacgagtttgttctatatgaagtaaagtcagcttatgctaagaacaaacctgattttgatgttgaatgggaggcgaaagtaaaagcagcaactgaactagggctagaattggagcttgttgaagagagtgatattagggatacggttgtattaaataatcttaagcgcatgcatcgttatgcttcgaaagatgagctgaataacgtacataactctctcttaaaaataataaagtacaatggcgcccaatctgcaagatgcttgggagaacagttgggtttaaaaggccgaactgttttaccaattttgtgcgatttgctgtcaaggtgtttactcgatacacgtttggataagcctctatctcttgaatctcgatttgagttggccagttatggctaagaaagggttctcaagtttccatagaaaagcagtctcttcccaagatacgcttgaatcgatagagcttgtctctagcgctaattgtctagaaagtgttacgtatcaagatatatcagcatttcccgaaacaattgcggtagagattaatttccgattaagcattcttcgctttttagcgcgaaagtgcgaaaccattgtggccaaatcaattgaaccacatcgtgtagagctacagcaaaactatagtagaaaaatacccagtgcaataacgatatatcgatggtggcttgcttttcgaaaatcagactacaaccccattagcttagcacctaatatcaaggatagaggtaatagagagacaaaagtgtcaacagttgttgattctattatggaacaggcagttgaaagagttatatctggacgaaaagtcaatgttagctctgcatataaacgtgttcgacgaaaagttcgtcaatacaatctaactcatggaacgaaatacacgtatcctaagtacgaatctgtaagaaagcgagtaaaaaagaaaaccccatttgagttattagccgcagggaaaggggagagagtagctaagagagagtttcgccgaatgggaaaaaagatcctcacgtctagcgtgctagagagggttgaaatagatcacactgtcgttgacctttttgcagtacacgaagagtatcgaatcccattgggccgaccttggcttactcaattggttgattgttacagtaaagctgtaatcggtttttatttaggtttcgagcctcctagctatgtgtcggtttcccttgcacttaagaatgcaatacaacgcaaagatgacttaatctcctcgtatgaatcgatcgagaatgaatggctatgttatggcatcccagacctactcgtaactgataatggtaaagagtttttgtcgaaagcatttgatcaagcatgtgaatcactattgatcaatgtgcatcaaaataaagttgagacgcccgacaacaaacctcatgttgaacgtaactacgggactattaatacttctctgttagacgatttacctgggaaatccttcagccagtaccttcaaagagaagggtacgactctgtgggagaagctacccttacactcaatgagattagagaaatttacttaatttggttggtggatatttatcataaaaaacccaatcagagaggcactaattgtcctaatgttgcgtggaaaaagggttgtcaagaatgggaaccagaggagttctctggttctaaagacgaattagactttaaatttgctattgttgattacaaacaacttactaaagtagggataactgtctacaaagaactgagttatagcaatgaccgtttagctgaatatagagggaagaaaggaaaccataaagttcagttcaagtataaccctgagtgtatggcagttatttgggtgttggatgaggatatgaatgagtactttacagttaatgcgattgactacgaatatgcaagtagagtatcactttggcaacataaatataacatgaaatatcaagcagaactaaattcagcagaatatgatgaggacaaggaaattgatgcagaaataaaaattgaagaaatcgcagatcgttcaattgttaagactaacaaaatcagagctcggaggcgtggcgctaggcatcaagagaatagcgcaagggctaagtcaatcagtaatgcgaacccggcctcgatacaaaaacatgaagatgaaatcgttagtgcagataatgacgattgggatattgattatgtctgagaaatcgtcaaatgagtgaaacgcgtgaggctcgtatatcaagagctaaaagggcatttgtatccacaccgagcgttaggaaaatcttgagttacatggatagatgtagagatctatcagacctagagtctgagcctacatgcatgatggtctatggtgcttcgggtgtaggtaaaacgaccgtcatcaagaaatacttaaatcaaaacagaagagagtccgaagccgggggcgatataataccggttttgcatattgagttgccagacaatgcgaagccagtagatgcagcaagggaattgctggttgaaatgggtgacccgctagcactttatgaaactgacttagctagattgacgaaaagactgactgaattaatccctgcggtcggcgtgaagctgattattatcgatgagttccaacatttggtggaagaaaggtcaaatcgggttcttacccaagtaggtaattggctaaaaatgatacttaacaaaacgaaatgtccaattgttatatttggtatgccatactcaaaagttgtactgcaagcaaactcgcaacttcacgggcgattttccattcaggttgaactgcgcccctttagctaccagggaggtagaggtgtatttaaaacttttttggaataccttgataaagccctaccttttgaaaaacaggctggcttagccaacgaaagtttgcagaaaaaattgtatgcattctctcagggaaacatgcgttcgttgagaaaccttatttatcaagcatctatcgaagcaattgataatcagcatgagacgataaccgaagaagatttcgtttttgcatcgaagttgacatcgggcgataaacccaactcatggaaaaatccttttgaggagggtgttgaggtaacagaagatatgttacgaccgccaccaaaagatattggttgggaggactatttgagacattcaaccccgagagtgagtaaaccaggtagaaataaaaactttttcgaataacctaggctgctgcgctgctgccaccgctgagcaataactagcataaccccttggggcctctaaacgggtcttgaggggttttttgctgaaacctcaggcatttgttgttgatacaaccataaaatgataattacacccataaattgataattatcacacccataaattgatattgcctcttcatggtctaaacttcagtaagtttacgacattttcctcgaggtcatttccggggatccatggagaaaaaaatcactggatataccaccgttgatatatcccaatggcatcgtaaagaacattttgaggcatttcagtcagttgctcaatgtacctataaccagaccgttcagctggatattacggcctttttaaagaccgtaaagaaaaataagcacaagttttatccggcctttattcacattcttgcccgcctgatgaatgctcatccggagttccgtatggcaatgaaagacggtgagctggtgatatgggatagtgttcacccttgttacaccgttttccatgagcaaactgaaacgttttcatcgctctggagtgaataccacgacgatttccggcagtttctacacatatattcgcaagatgtggcgtgttacggtgaaaacctggcctatttccctaaagggtttattgagaatatgtttttcgtctcagccaatccctgggtgagtttcaccagttttgatttaaacgtggccaatatggacaacttcttcgcccccgttttcactatgggcaaatattatacgcaaggcgacaaggtgctgatgccgctggcgattcaggttcatcatgccgtttgtgatggcttccatgtcggcagaatgcttaatgaattacaacagtactgcgatgagtggcagggcggggcgtaatttttttaaggcagttattggtgcccttctagagtccttactgcagtagttttgctgaaatactcgattcacaaaaatatcaacttatggttgttttgtgagatatcaatatatggttgttttgtggttaagttgctgattataaataattattaaatatcactttatggttgcatcaacaggtaccgagctcgaattcactggccgtcgttttacaacgtcgtgactgggaaaaccctggcgttacccaacttaatcgccttgctatcgtggccggatcttgcggcccctcggcttgaacgaattgttagacattatttgccgactaccttggtgatctcgcctttcacgtagtggacaaattcttccaactgatctgcgcgcgaggccaagcgatcttcttcttgtccaagataagcctgtctagcttcaagtatgacgggctgatactgggccggcaggcgctccattgcccagtcggcagcgacatccttcggcgcgattttgccggttactgcgctgtaccaaatgcgggacaacgtaagcactacatttcgctcatcgccagcccagtcgggcggcgagttccatagcgttaaggtttcatttagcgcctcaaatagatcctgttcaggaaccggatcaaagagttcctccgccgctggacctaccaaggcaacgctatgttctcttgcttttgtcagcaagatagccagatcaatgtcgatcgtggctggctcgaagatacctgcaagaatgtcattgcgctgccattctccaaattgcagttcgcgcttagctggataacgccacggaatgatgtcgtcgtgcacaacaatggtgacttctacagcgcggagaatctcgctctctccaggggaagccgaagtttccaaaaggtcgttgatcaaagctcgccgcgttgtttcatcaagccttacggtcaccgtaaccagcaaatcaatatcactgtgtggcttcaggccgccatccactgcggagccgtacaaatgtacggccagcaacgtcggttcgagatggcgctcgatgacgccaactacctctgatagttgagtcgatacttcggcgatcaccgcttccctcatactcttcctttttcaatattattgaagcatttatcagggttattgtctcatgagcggatacatatttgaatgtatttagaaaaataaacaaatagctagctcactcggtcgctacgctccgggcgtgagactgcggcgggcgctgcggacacatacaaagttacccacagattccgtggataagcaggggactaacatgtgaggcaaaacagcagggccgcgccggtggcgtttttccataggctccgccctcctgccagagttcacataaacagacgcttttccggtgcatctgtgggagccgtgaggctcaaccatgaatctgacagtacgggcgaaacccgacaggacttaaagatccccaccgtttccggcgggtcgctccctcttgcgctctcctgttccgaccctgccgtttaccggatacctgttccgcctttctcccttacgggaagtgtggcgctttctcatagctcacacactggtatctcggctcggtgtaggtcgttcgctccaagctgggctgtaagcaagaactccccgttcagcccgactgctgcgccttatccggtaactgttcacttgagtccaacccggaaaagcacggtaaaacgccactggcagcagccattggtaactgggagttcgcagaggatttgtttagctaaacacgcggttgctcttgaagtgtgcgccaaagtccggctacactggaaggacagatttggttgctgtgctctgcgaaagccagttaccacggttaagcagttccccaactgacttaaccttcgatcaaaccacctccccaggtggttttttcgtttacagggcaaaagattacgcgcagaaaaaaaggatctcaagaagatcctttgatcttttctactgaaccgctctagatttcagtgcaatttatctcttcaaatgtagcacctgaagtcagccccatacgatataagttgtaattctcatgttagtcatgccccgcgcccaccggaaggagctgactgggttgaaggctctcaagggcatcggtcgagatcccggtgcctaatgagtgagctaacttacattaattgcgttgcgctcactgcccgctttccagtcgggaaacctgtcgtgccagctgcattaatgaatcggccaacgcgcggggagaggcggtttgcgtattgggcgccagggtggtttttcttttcaccagtgagacgggcaacagctgattgcccttcaccgcctggccctgagagagttgcagcaagcggtccacgctggtttgccccagcaggcgaaaatcctgtttgatggtggttaacggcgggatataacatgagctgtcttcggtatcgtcgtatcccactaccgagatgtccgcaccaacgcgcagcccggactcggtaatggcgcgcattgcgcccagcgccatctgatcgttggcaaccagcatcgcagtgggaacgatgccctcattcagcatttgcatggtttgttgaaaaccggacatggcactccagtcgccttcccgttccgctatcggctgaatttgattgcgagtgagatatttatgccagccagccagacgcagacgcgccgagacagaacttaatgggcccgctaacagcgcgatttgctggtgacccaatgcgaccagatgctccacgcccagtcgcgtaccgtcttcatgggagaaaataatactgttgatgggtgtctggtcagagacatcaagaaataacgccggaacattagtgcaggcagcttccacagcaatggcatcctggtcatccagcggatagttaatgatcagcccactgacgcgttgcgcgagaagattgtgcaccgccgctttacaggcttcgacgccgcttcgttctaccatcgacaccaccacgctggcacccagttgatcggcgcgagatttaatcgccgcgacaatttgcgacggcgcgtgcagggccagactggaggtggcaacgccaatcagcaacgactgtttgcccgccagttgttgtgccacgcggttgggaatgtaattcagctccgccatcgccgcttccactttttcccgcgttttcgcaga

SEQ ID NO: 34 - DNA, 12874 bp, artificial sequence
  Synthetic
aacgtggctggcctggttcaccacgcgggaaacggtctgataagagacaccggcatactctgcgacatcgtataacgttactggtttcacattcaccaccctgaattgactctcttccgggcgctatcatgccataccgcgaaaggttttgcgccattcgatggtgtccgggatctcgacgctctcccttatgcgactcctgcattaggaatggataaccgtattaccgcctttgagtgagctgataccgctcgccgcagccgaactaccgagcgcagcgagtcagtgagcgaggagcgactcctgcattaggaaattaatacgactcactataggggaattgtgagcggataacaattcccctgtagaaataattttgtttaactttaataaggagatataccatgggtgaactgccgagtaggtagctgataacgagacctctgtcttgtcagctagggtggtctcgtgaactgccgagtaggtagctgataacggatccgaattcgagcgaaggagatatacatatgtttttgcaaagacctaaaccttacagcgatgaaagtttagaaagtttctttatccgagtggctaacaaaaatggctacggtgatgtccatcgcttcctagaagccactaaacgattccttcaagacattgaccataatggctatcaaacctttccgactgatataactcggataaacccatactcagctaaaaacagttccagcgcacgaactgcgtcattcctgaaacttgcacaattgacatttaatgaaccgccagagctacttgggttggcaattaacagaacaaacatgaaatactcgccgtcaactagcgcggttgttagaggtgcagaagtctttcctcgcagtttactacggacgcactccatcccctgctgtcctttgtgtctgcgagaaaatggctacgcctcctacctttggcactttcaggggtacgaatactgccacagccataacgtacctttaattaccacttgtagctgtggtaaggagtttgactaccgagtatctgggttaaagggcatttgctgcaaatgcaaggagcctatcaccttaaccagcagggagaacggtcatgaggcagcgtgtactgtttcaaactggcttgctggccatgaatctaaacctctgccaaatcttcctaaaagctaccgatggggtttagttcattggtggatgggtattaaagatagcgagttcgatcacttttcgttcgttcaatttttctcaaactggccaaggtcattccactcgataatcgaagatgaagtagagttcaaccttgagcatgctgttgtcagcacgtctgaattacgactaaaagatcttcttggtcgattgtttttcggttcaattcggttacctgagcggaatcttcaacacaatatcatccttggtgagcttctctgctatttagaaaatcgtttatggcaagacaagggattaatcgccaacctcaaaatgaacgcgttagaggcgactgtaatgttaaattgtagcctcgatcagattgcatcaatggttgaacaacgcatcttgaagccaaatcgaaaaagcaagcccaacagccctcttgatgttaccgattatctatttcatttcggcgatattttctgtctttggttagctgagttccaaagcgatgagtttaaccgttcgttttatgtgtcgaggtggtaaatgcaaactctgaaagaactaatcgcatccaatcctgacgacttaacaactgaacttaagagagcatttcgtccactcacaccgcatattgcaattgatggtaatgaacttgacgcactgacgatattagtcaatttaaccgataagactgatgatcagaaagacctgctcgatcgagccaaatgcaagcaaaaacttcgagatgaaaaatggtgggctagctgcataaattgcgttaattacagacaaagccataacccaaaattcccggatatacgttctgaaggcgtgattcgaacccaagccctgggtgaattaccgagtttcctactctcgtcctcaaaaatcccaccataccattggtcatatagccatgattcaaaatacgtcaacaaaagcgcattcctcaccaatgagttttgttgggatggtgagatctcatgtttgggtgagcttcttaaagatgcagatcacccactttggaatactttgaaaaagttaggttgttctcaaaaaacttgcaaagcaatggcaaaacaactagctgatattactctcacgactatcaatgtcacactcgcaccaaattacctgactcaaatatctctccccgatagtgatacatcctacatttcactctctcctgttgcatcgctatcgatgcaaagccactttcatcagaggctccaagatgaaaatcggcatagcgcgataacgcggtttagccgaactaccaacatgggggtcactgcgatgacatgtggcggcgcatttagaatgttaaagtctggcgctaagttttccagcccccctcatcaccgattaaacagtaaacgaagttggttgacgtcagagcatgttcagtcattaaaacagtaccagcgcctcaacaaaagcctcatacctgaaaactctcggattgcactccgtagaaaatacaaaatcgagcttcaaaatatggtcagatcttggtttgcaatgcaagaccatacccttgattcgaacatacttatccaacatttgaatcatgacctatcttacttaggagccacaaaacgttttgcatacgatccagcgatgaccaagctctttactgagcttttgaaacgagagttatcaaattcaatcaataatggtgagcaacacactaatggatcgtttttagtcctaccgaatatcagggtttgtggcgcaacagctttaagctccccggtaacggtggggattccatcacttacagctttctttggcttcgttcacgcatttgaacggaatataaatcgcaccacctcatcgtttcgtgttgaatcctttgcgatatgcgtccatcaactacatgtcgagaagcgaggtttgacagcagagtttgtggaaaaaggcgacgggactatatccgctcccgcgacccgggatgactggcagtgtgatgtcgtatttagccttattttgaacaccaactttgctcaacatattgaccaagatacgttagttacatcactaccaaagcgattggctcggggttcagcaaaaattgcgattgatgactttaaacatatcaactcattctcgacattagaaacagcgatcgaatctctgccaatagaagctggtaggtggttatcactttacgcacagtcaaacaataatctaagtgatctattagcagccatgacagaggaccatcagctcatggcaagctgcgtcggttaccacttgttagaagagcccaaagataaaccaaactccctcagaggttacaaacacgctatcgccgagtgcatcattggactcattaactcaatcacctttagctcagagactgatcccaacacaatcttttggtcgctaaagaactatcaaaactacctagtggtacagccaaggagtatcaacgatgaaactaccgacaaatctagcctatgagcgctctatcgacccatcagatgtctgtttttttgtcgtctggcccgatgatagaaaaacacctttaacctacaattctcgtactctgctcgggcaaatggaagcggcatcattagcctatgatgtctcaggtcaaccaataaaaagtgccaccgctgaggcgttagctcaagggaaccctcatcaagttgatttctgccacgttccatacggtgcgagtcatattgaatgcagtttctccgtctcgttttcttctgaactacgtcaaccatataagtgtaactcaagcaaagttaaacaaacgctagtgcaattagtcgagctctacgaaacgaaaatcggctggactgagctagcaacccgatatttgatgaacatttgcaacggtaaatggctgtggaaaaatacccgtaaagcctattgctggaacattgtacttacaccttggccttggaacggggaaaaggttggatttgaagatattcgtactaactacacctcacggcaagactttaaaaataataaaaattggtctgctatagttgaaatgatcaaaaccgcattttctagtactgatgggctggcgatatttgaagtcagggccaccttgcacttgccaacgaatgctatggtgcggccaagccaagttttcacagaaaaagaaagtggcagtaaaagtaaatctaaaactcaaaacagtcgagtttttcagagtacaactattgatggtgaacgatcgccaatactaggggcctttaaaacgggagcagctattgcaaccattgacgactggtatcctgaagccactgagccactaagggtcggacggtttggggttcatcgcgaagatgtcacttgctaccgtcatccgtctaccggaaaagattttttctcgatattacaacaagcagagcactatattgaagtgttgagcgccaacaaaactcccgctcaagaaactatcaacgacatgcactttttaatggctaacctgattaagggtgggatgttccagcataaaggagactgactgtgaaatggtattataagacaatcacctttctgccagagttgtgcaacaacgagtcactggctgcaaagtgtctccgcgttctgcatggatttaactatcagtatgagacacgaaatatcggcgtttcatttccgctttggtgtgatgcaacggttggaaaaaagatttcatttgtcagcaagaacaagatagaactcgacttactacttaaacaacactatttcgtccaaatggaacaacttcaatactttcatatatccaacactgttctcgtcccagaagattgtacatacgtttcctttagacgctgtcaatctatagataagctcacagcagcagggctggcaaggaaaatcagacgcctggagaaacgtgctctatctagaggcgagcaatttgacccatcatcttttgctcaaaaagagcatactgcaatagcgcactaccactcacttggggagtccagcaaacagacgaaccgcaactttcgactcaatatcaggatgctctcggagcaaccccgtgaggggaactcgatttttagtagctatggcttatcaaattcagaaaactcgtttcagcctgtacccttaatctgacctttaataaggagatataccatggcgacaagtttacctacgccctcagcaattacgacttcggcgttagagtatgcattccatactcccgctcgcaatctaacgaaatctcgcggaaaaaacattcatcgttatgtcagtgtaaagatgagtaagaggattacggtagaatctactctagagtgtgatgcctgctatcactttgattttgagccaagtattgttcgcttttgcgctcaaccgattcgatttttatattatctcaatggtcagtctcactcctatgttcctgactttctagttcaatttgataccaacgagtttgttctatatgaagtaaagtcagcttatgctaagaacaaacctgattttgatgttgaatgggaggcgaaagtaaaagcagcaactgaactagggctagaattggagcttgttgaagagagtgatattagggatacggttgtattaaataatcttaagcgcatgcatcgttatgcttcgaaagatgagctgaataacgtacataactctctcttaaaaataataaagtacaatggcgcccaatctgcaagatgcttgggagaacagttgggtttaaaaggccgaactgttttaccaattttgtgcgatttgctgtcaaggtgtttactcgatacacgtttggataagcctctatctcttgaatctcgatttgagttggccagttatggctaagaaagggttctcaagtttccatagaaaagcagtctcttcccaagatacgcttgaatcgatagagcttgtctctagcgctaattgtctagaaagtgttacgtatcaagatatatcagcatttcccgaaacaattgcggtagagattaatttccgattaagcattcttcgctttttagcgcgaaagtgcgaaaccattgtggccaaatcaattgaaccacatcgtgtagagctacagcaaaactatagtagaaaaatacccagtgcaataacgatatatcgatggtggcttgcttttcgaaaatcagactacaaccccattagcttagcacctaatatcaaggatagaggtaatagagagacaaaagtgtcaacagttgttgattctattatggaacaggcagttgaaagagttatatctggacgaaaagtcaatgttagctctgcatataaacgtgttcgacgaaaagttcgtcaatacaatctaactcatggaacgaaatacacgtatcctaagtacgaatctgtaagaaagcgagtaaaaaagaaaaccccatttgagttattagccgcagggaaaggggagagagtagctaagagagagtttcgccgaatgggaaaaaagatcctcacgtctagcgtgctagagagggttgaaatagatcacactgtcgttgacctttttgcagtacacgaagagtatcgaatcccattgggccgaccttggcttactcaattggttgattgttacagtaaagctgtaatcggtttttatttaggtttcgagcctcctagctatgtgtcggtttcccttgcacttaagaatgcaatacaacgcaaagatgacttaatctcctcgtatgaatcgatcgagaatgaatggctatgttatggcatcccagacctactcgtaactgataatggtaaagagtttttgtcgaaagcatttgatcaagcatgtgaatcactattgatcaatgtgcatcaaaataaagttgagacgcccgacaacaaacctcatgttgaacgtaactacgggactattaatacttctctgttagacgatttacctgggaaatccttcagccagtaccttcaaagagaagggtacgactctgtgggagaagctacccttacactcaatgagattagagaaatttacttaatttggttggtggatatttatcataaaaaacccaatcagagaggcactaattgccctaatgttgcgtggaaaaagggttgtcaagaatgggaaccagaggagttctctggttctaaagacgaattagactttaaatttgctattgttgattacaaacaacttactaaagtagggataactgtctacaaagaactgagttatagcaatgaccgtttagctgaatatagagggaagaaaggaaaccataaagttcagttcaagtataaccctgagtgtatggcagttatttgggtgttggatgaggatatgaatgagtactttacagttaatgcgattgactacgaatatgcaagtagagtatcactttggcaacataaatataacatgaaatatcaagcagaactaaattcagcagaatatgatgaggacaaggaaattgatgcagaaataaaaattgaagaaatcgcagatcgttcaattgttaagactaacaaaatcagagctcggaggcgtggcgctaggcatcaagagaatagcgcaagggctaagtcaatcagtaatgcgaacccggcctcgatacaaaaacatgaagatgaaatcgttagtgcagataatgacgattgggatattgattatgtctgagaaatcgtcaaatgagtgaaacgcgtgaggctcgtatatcaagagctaaaagggcatttgtatccacaccgagcgttaggaaaatcttgagttacatggatagatgtagagatctatcagacctagagtctgagcctacatgcatgatggtctatggtgcttcgggtgtaggtaaaacgaccgtcatcaagaaatacttaaatcaaaacagaagagagtccgaagccgggggcgatataataccggttttgcatattgagttgccagacaatgcgaagccagtagatgcagcaagggaattgctggttgaaatgggtgacccgctagcactttatgaaactgacttagctagattgacgaaaagactgactgaattaatccctgcggtcggcgtgaagctgattattatcgatgagttccaacatttggtggaagaaaggtcaaatcgggttcttacccaagtaggtaattggctaaaaatgatacttaacaaaacgaaatgtccaattgttatatttggtatgccatactcaaaagttgtactgcaagcaaactcgcaacttcacgggcgattttccattcaggttgaactgcgcccctttagctaccagggaggtagaggtgtatttaaaacttttttggaataccttgataaagccctaccttttgaaaaacaggctggcttagccaacgaaagtttgcagaaaaaattgtatgcattctctcagggaaacatgcgttcgttgagaaaccttatttatcaagcatctatcgaagcaattgataatcagcatgagacgataaccgaagaagatttcgtttttgcatcgaagttgacatcgggcgataaacccaactcatggaaaaatccttttgaggagggtgttgaggtaacagaagatatgttacgaccgccaccaaaagatattggttgggaggactatttgagacattcaaccccgagagtgagtaaaccaggtagaaataaaaactttttcgaataacctaggctgctgcgctgctgccaccgctgagcaataactagcataaccccttggggcctctaaacgggtcttgaggggttttttgctgaaacctcaggcatttgttgttgatacaaccataaaatgataattacacccataaattgataattatcacacccataaattgatattgcctcttcatggtctaaacttcagtaagtttacgacattttcctcgaggtcatttccggggatccatggagaaaaaaatcactggatataccaccgttgatatatcccaatggcatcgtaaagaacattttgaggcatttcagtcagttgctcaatgtacctataaccagaccgttcagctggatattacggcctttttaaagaccgtaaagaaaaataagcacaagttttatccggcctttattcacattcttgcccgcctgatgaatgctcatccggagttccgtatggcaatgaaagacggtgagctggtgatatgggatagtgttcacccttgttacaccgttttccatgagcaaactgaaacgttttcatcgctctggagtgaataccacgacgatttccggcagtttctacacatatattcgcaagatgtggcgtgttacggtgaaaacctggcctatttccctaaagggtttattgagaatatgtttttcgtctcagccaatccctgggtgagtttcaccagttttgatttaaacgtggccaatatggacaacttcttcgcccccgttttcactatgggcaaatattatacgcaaggcgacaaggtgctgatgccgctggcgattcaggttcatcatgccgtttgtgatggcttccatgtcggcagaatgcttaatgaattacaacagtactgcgatgagtggcagggcggggcgtaatttttttaaggcagttattggtgcccttctagagtccttactgcagtagttttgctgaaatactcgattcacaaaaatatcaacttatggttgttttgtgagatatcaatatatggttgttttgtggttaagttgctgattataaataattattaaatatcactttatggttgcatcaacaggtaccgagctcgaattcactggccgtcgttttacaacgtcgtgactgggaaaaccctggcgttacccaacttaatcgccttgctatcgtggccggatcttgcggcccctcggcttgaacgaattgttagacattatttgccgactaccttggtgatctcgcctttcacgtagtggacaaattcttccaactgatctgcgcgcgaggccaagcgatcttcttcttgtccaagataagcctgtctagcttcaagtatgacgggctgatactgggccggcaggcgctccattgcccagtcggcagcgacatccttcggcgcgattttgccggttactgcgctgtaccaaatgcgggacaacgtaagcactacatttcgctcatcgccagcccagtcgggcggcgagttccatagcgttaaggtttcatttagcgcctcaaatagatcctgttcaggaaccggatcaaagagttcctccgccgctggacctaccaaggcaacgctatgttctcttgcttttgtcagcaagatagccagatcaatgtcgatcgtggctggctcgaagatacctgcaagaatgtcattgcgctgccattctccaaattgcagttcgcgcttagctggataacgccacggaatgatgtcgtcgtgcacaacaatggtgacttctacagcgcggagaatctcgctctctccaggggaagccgaagtttccaaaaggtcgttgatcaaagctcgccgcgttgtttcatcaagccttacggtcaccgtaaccagcaaatcaatatcactgtgtggcttcaggccgccatccactgcggagccgtacaaatgtacggccagcaacgtcggttcgagatggcgctcgatgacgccaactacctctgatagttgagtcgatacttcggcgatcaccgcttccctcatactcttcctttttcaatattattgaagcatttatcagggttattgtctcatgagcggatacatatttgaatgtatttagaaaaataaacaaatagctagctcactcggtcgctacgctccgggcgtgagactgcggcgggcgctgcggacacatacaaagttacccacagattccgtggataagcaggggactaacatgtgaggcaaaacagcagggccgcgccggtggcgtttttccataggctccgccctcctgccagagttcacataaacagacgcttttccggtgcatctgtgggagccgtgaggctcaaccatgaatctgacagtacgggcgaaacccgacaggacttaaagatccccaccgtttccggcgggtcgctccctcttgcgctctcctgttccgaccctgccgtttaccggatacctgttccgcctttctcccttacgggaagtgtggcgctttctcatagctcacacactggtatctcggctcggtgtaggtcgttcgctccaagctgggctgtaagcaagaactccccgttcagcccgactgctgcgccttatccggtaactgttcacttgagtccaacccggaaaagcacggtaaaacgccactggcagcagccattggtaactgggagttcgcagaggatttgtttagctaaacacgcggttgctcttgaagtgtgcgccaaagtccggctacactggaaggacagatttggttgctgtgctctgcgaaagccagttaccacggttaagcagttccccaactgacttaaccttcgatcaaaccacctccccaggtggttttttcgtttacagggcaaaagattacgcgcagaaaaaaaggatctcaagaagatcctttgatcttttctactgaaccgctctagatttcagtgcaatttatctcttcaaatgtagcacctgaagtcagccccatacgatataagttgtaattctcatgttagtcatgccccgcgcccaccggaaggagctgactgggttgaaggctctcaagggcatcggtcgagatcccggtgcctaatgagtgagctaacttacattaattgcgttgcgctcactgcccgctttccagtcgggaaacctgtcgtgccagctgcattaatgaatcggccaacgcgcggggagaggcggtttgcgtattgggcgccagggtggtttttcttttcaccagtgagacgggcaacagctgattgcccttcaccgcctggccctgagagagttgcagcaagcggtccacgctggtttgccccagcaggcgaaaatcctgtttgatggtggttaacggcgggatataacatgagctgtcttcggtatcgtcgtatcccactaccgagatgtccgcaccaacgcgcagcccggactcggtaatggcgcgcattgcgcccagcgccatctgatcgttggcaaccagcatcgcagtgggaacgatgccctcattcagcatttgcatggtttgttgaaaaccggacatggcactccagtcgccttcccgttccgctatcggctgaatttgattgcgagtgagatatttatgccagccagccagacgcagacgcgccgagacagaacttaatgggcccgctaacagcgcgatttgctggtgacccaatgcgaccagatgctccacgcccagtcgcgtaccgtcttcatgggagaaaataatactgttgatgggtgtctggtcagagacatcaagaaataacgccggaacattagtgcaggcagcttccacagcaatggcatcctggtcatccagcggatagttaatgatcagcccactgacgcgttgcgcgagaagattgtgcaccgccgctttacaggcttcgacgccgcttcgttctaccatcgacaccaccacgctggcacccagttgatcggcgcgagatttaatcgccgcgacaatttgcgacggcgcgtgcagggccagactggaggtggcaacgccaatcagcaacgactgtttgcccgccagttgttgtgccacgcggttgggaatgtaattcagctccgccatcgccgcttccactttttcccgcgttttcgcaga

SEQ ID NO: 35 - DNA, 11860 bp, artificial sequence
  Synthetic
acctgaagtcagccccatacgatataagttgtaattctcatgttagtcatgccccgcgcccaccggaaggagctgactgggttgaaggctctcaagggcatcggtcgagatcccggtgcctaatgagtgagctaacttacattaattgcgttgcgctcactgcccgctttccagtcgggaaacctgtcgtgccagctgcattaatgaatcggccaacgcgcggggagaggcggtttgcgtattgggcgccagggtggtttttcttttcaccagtgagacgggcaacagctgattgcccttcaccgcctggccctgagagagttgcagcaagcggtccacgctggtttgccccagcaggcgaaaatcctgtttgatggtggttaacggcgggatataacatgagctgtcttcggtatcgtcgtatcccactaccgagatgtccgcaccaacgcgcagcccggactcggtaatggcgcgcattgcgcccagcgccatctgatcgttggcaaccagcatcgcagtgggaacgatgccctcattcagcatttgcatggtttgttgaaaaccggacatggcactccagtcgccttcccgttccgctatcggctgaatttgattgcgagtgagatatttatgccagccagccagacgcagacgcgccgagacagaacttaatgggcccgctaacagcgcgatttgctggtgacccaatgcgaccagatgctccacgcccagtcgcgtaccgtcttcatgggagaaaataatactgttgatgggtgtctggtcagagacatcaagaaataacgccggaacattagtgcaggcagcttccacagcaatggcatcctggtcatccagcggatagttaatgatcagcccactgacgcgttgcgcgagaagattgtgcaccgccgctttacaggcttcgacgccgcttcgttctaccatcgacaccaccacgctggcacccagttgatcggcgcgagatttaatcgccgcgacaatttgcgacggcgcgtgcagggccagactggaggtggcaacgccaatcagcaacgactgtttgcccgccagttgttgtgccacgcggttgggaatgtaattcagctccgccatcgccgcttccactttttcccgcgttttcgcagaaacgtggctggcctggttcaccacgcgggaaacggtctgataagagacaccggcatactctgcgacatcgtataacgttactggtttcacattcaccaccctgaattgactctcttccgggcgctatcatgccataccgcgaaaggttttgcgccattcgatggtgtccgggatctcgacgctctcccttatgcgactcctgcattaggaatggataaccgtattaccgcctttgagtgagctgataccgctcgccgcagccgaacgaccgagcgcagcgagtcagtgagcgaggacacaagctttgacagctagctcagtcctaggtataatactagcgtcgacgtggagatataccatgggtgaactgccgagtaggtagctgataacgagacctctgtcttgtcagctagggtggtctcgtgaactgccgagtaggtagctgataacggatccgaattcgagcgaaggagatatacatatgtttttgcaaagacctaaaccttacagcgatgaaagtttagaaagtttctttatccgagtggctaacaaaaatggctacggtgatgtccatcgcttcctagaagccactaaacgattccttcaagacattgaccataatggctatcaaacctttccgactgatataactcggataaacccatactcagctaaaaacagttccagcgcacgaactgcgtcattcctgaaacttgcacaattgacatttaatgaaccgccagagctacttgggttggcaattaacagaacaaacatgaaatactcgccgtcaactagcgcggttgttagaggtgcagaagtctttcctcgcagtttactacggacgcactccatcccctgctgtcctttgtgtctgcgagaaaatggctacgcctcctacctttggcactttcaggggtacgaatactgccacagccataacgtacctttaattaccacttgtagctgtggtaaggagtttgactaccgagtatctgggttaaagggcatttgctgcaaatgcaaggagcctatcaccttaaccagcagggagaacggtcatgaggcagcgtgtactgtttcaaactggcttgctggccatgaatctaaacctctgccaaatcttcctaaaagctaccgatggggtttagttcattggtggatgggtattaaagatagcgagttcgatcacttttcgttcgttcaatttttctcaaactggccaaggtcattccactcgataatcgaagatgaagtagagttcaaccttgagcatgctgttgtcagcacgtctgaattacgactaaaagatcttcttggtcgattgtttttcggttcaattcggttacctgagcggaatcttcaacacaatatcatccttggtgagcttctctgctatttagaaaatcgtttatggcaagacaagggattaatcgccaacctcaaaatgaacgcgttagaggcgactgtaatgttaaattgtagcctcgatcagattgcatcaatggttgaacaacgcatcttgaagccaaatcgaaaaagcaagcccaacagccctcttgatgttaccgattatctatttcatttcggcgatattttctgtctttggttagctgagttccaaagcgatgagtttaaccgttcgttttatgtgtcgaggtggtaaatgcaaactctgaaagaactaatcgcatccaatcctgacgacttaacaactgaacttaagagagcatttcgtccactcacaccgcatattgcaattgatggtaatgaacttgacgcactgacgatattagtcaatttaaccgataagactgatgatcagaaagacctgctcgatcgagccaaatgcaagcaaaaacttcgagatgaaaaatggtgggctagctgcataaattgcgttaattacagacaaagccataacccaaaattcccggatatacgttctgaaggcgtgattcgaacccaagccctgggtgaattaccgagtttcctactctcgtcctcaaaaatcccaccataccattggtcatatagccatgattcaaaatacgtcaacaaaagcgcattcctcaccaatgagttttgttgggatggtgagatctcatgtttgggtgagcttcttaaagatgcagatcacccactttggaatactttgaaaaagttaggttgttctcaaaaaacttgcaaagcaatggcaaaacaactagctgatattactctcacgactatcaatgtcacactcgcaccaaattacctgactcaaatatctctccccgatagtgatacatcctacatttcactctctcctgttgcatcgctatcgatgcaaagccactttcatcagaggctccaagatgaaaatcggcatagcgcgataacgcggtttagccgaactaccaacatgggggtcactgcgatgacatgtggcggcgcatttagaatgttaaagtctggcgctaagttttccagcccccctcatcaccgattaaacagtaaacgaagttggttgacgtcagagcatgttcagtcattaaaacagtaccagcgcctcaacaaaagcctcatacctgaaaactctcggattgcactccgtagaaaatacaaaatcgagcttcaaaatatggtcagatcttggtttgcaatgcaagaccatacccttgattcgaacatacttatccaacatttgaatcatgacctatcttacttaggagccacaaaacgttttgcatacgatccagcgatgaccaagctctttactgagcttttgaaacgagagttatcaaattcaatcaataatggtgagcaacacactaatggatcgtttttagtcctaccgaatatcagggtttgtggcgcaacagctttaagctccccggtaacggtggggattccatcacttacagctttctttggcttcgttcacgcatttgaacggaatataaatcgcaccacctcatcgtttcgtgttgaatcctttgcgatatgcgtccatcaactacatgtcgagaagcgaggtttgacagcagagtttgtggaaaaaggcgacgggactatatccgctcccgcgacccgggatgactggcagtgtgatgtcgtatttagccttattttgaacaccaactttgctcaacatattgaccaagatacgttagttacatcactaccaaagcgattggctcggggttcagcaaaaattgcgattgatgactttaaacatatcaactcattctcgacattagaaacagcgatcgaatctctgccaatagaagctggtaggtggttatcactttacgcacagtcaaacaataatctaagtgatctattagcagccatgacagaggaccatcagctcatggcaagctgcgtcggttaccacttgttagaagagcccaaagataaaccaaactccctcagaggttacaaacacgctatcgccgagtgcatcattggactcattaactcaatcacctttagctcagagactgatcccaacacaatcttttggtcgctaaagaactatcaaaactacctagtggtacagccaaggagtatcaacgatgaaactaccgacaaatctagcctatgagcgctctatcgacccatcagatgtctgtttttttgtcgtctggcccgatgatagaaaaacacctttaacctacaattctcgtactctgctcgggcaaatggaagcggcatcattagcctatgatgtctcaggtcaaccaataaaaagtgccaccgctgaggcgttagctcaagggaaccctcatcaagttgatttctgccacgttccatacggtgcgagtcatattgaatgcagtttctccgtctcgttttcttctgaactacgtcaaccatataagtgtaactcaagcaaagttaaacaaacgctagtgcaattagtcgagctctacgaaacgaaaatcggctggactgagctagcaacccgatatttgatgaacatttgcaacggtaaatggctgtggaaaaatacccgtaaagcctattgctggaacattgtacttacaccttggccttggaacggggaaaaggttggatttgaagatattcgtactaactacacctcacggcaagactttaaaaataataaaaattggtctgctatagttgaaatgatcaaaaccgcattttctagtactgatgggctggcgatatttgaagtcagggccaccttgcacttgccaacgaatgctatggtgcggccaagccaagttttcacagaaaaagaaagtggcagtaaaagtaaatctaaaactcaaaacagtcgagtttttcagagtacaactattgatggtgaacgatcgccaatactaggggcctttaaaacgggagcagctattgcaaccattgacgactggtatcctgaagccactgagccactaagggtcggacggtttggggttcatcgcgaagatgtcacttgctaccgtcatccgtctaccggaaaagattttttctcgatattacaacaagcagagcactatattgaagtgttgagcgccaacaaaactcccgctcaagaaactatcaacgacatgcactttttaatggctaacctgattaagggtgggatgttccagcataaaggagactgactgtgaaatggtattataagacaatcacctttctgccagagttgtgcaacaacgagtcactggctgcaaagtgtctccgcgttctgcatggatttaactatcagtatgagacacgaaatatcggcgtttcatttccgctttggtgtgatgcaacggttggaaaaaagatttcatttgtcagcaagaacaagatagaactcgacttactacttaaacaacactatttcgtccaaatggaacaacttcaatactttcatatatccaacactgttctcgtcccagaagattgtacatacgtttcctttagacgctgtcaatctatagataagctcacagcagcagggctggcaaggaaaatcagacgcctggagaaacgtgctctatctagaggcgagcaatttgacccatcatcttttgctcaaaaagagcatactgcaatagcgcactaccactcacttggggagtccagcaaacagacgaaccgcaactttcgactcaatatcaggatgctctcggagcaaccccgtgaggggaactcgatttttagtagctatggcttatcaaattcagaaaactcgtttcagcctgtacccttaatctgacctttaataaggagatataccatggcgacaagtttacctacgccctcagcaattacgacttcggcgttagagtatgcattccatactcccgctcgcaatctaacgaaatctcgcggaaaaaacattcatcgttatgtcagtgtaaagatgagtaagaggattacggtagaatctactctagagtgtgatgcctgctatcactttgattttgagccaagtattgttcgcttttgcgctcaaccgattcgatttttatattatctcaatggtcagtctcactcctatgttcctgactttctagttcaatttgataccaacgagtttgttctatatgaagtaaagtcagcttatgctaagaacaaacctgattttgatgttgaatgggaggcgaaagtaaaagcagcaactgaactagggctagaattggagcttgttgaagagagtgatattagggatacggttgtattaaataatcttaagcgcatgcatcgttatgcttcgaaagatgagctgaataacgtacataactctctcttaaaaataataaagtacaatggcgcccaatctgcaagatgcttgggagaacagttgggtttaaaaggccgaactgttttaccaattttgtgcgatttgctgtcaaggtgtttactcgatacacgtttggataagcctctatctcttgaatctcgatttgagttggccagttatggctaagaaagggttctcaagtttccatagaaaagcagtctcttcccaagatacgcttgaatcgatagagcttgtctctagcgctaattgtctagaaagtgttacgtatcaagatatatcagcatttcccgaaacaattgcggtagagattaatttccgattaagcattcttcgctttttagcgcgaaagtgcgaaaccattgtggccaaatcaattgaaccacatcgtgtagagctacagcaaaactatagtagaaaaatacccagtgcaataacgatatatcgatggtggcttgcttttcgaaaatcagactacaaccccattagcttagcacctaatatcaaggatagaggtaatagagagacaaaagtgtcaacagttgttgattctattatggaacaggcagttgaaagagttatatctggacgaaaagtcaatgttagctctgcatataaacgtgttcgacgaaaagttcgtcaatacaatctaactcatggaacgaaatacacgtatcctaagtacgaatctgtaagaaagcgagtaaaaaagaaaaccccatttgagttattagccgcagggaaaggggagagagtagctaagagagagtttcgccgaatgggaaaaaagatcctcacgtctagcgtgctagagagggttgaaatagatcacactgtcgttgacctttttgcagtacacgaagagtatcgaatcccattgggccgaccttggcttactcaattggttgattgttacagtaaagctgtaatcggtttttatttaggtttcgagcctcctagctatgtgtcggtttcccttgcacttaagaatgcaatacaacgcaaagatgacttaatctcctcgtatgaatcgatcgagaatgaatggctatgttatggcatcccagacctactcgtaactgataatggtaaagagtttttgtcgaaagcatttgatcaagcatgtgaatcactattgatcaatgtgcatcaaaataaagttgagacgcccgacaacaaacctcatgttgaacgtaactacgggactattaatacttctctgttagacgatttacctgggaaatccttcagccagtaccttcaaagagaagggtacgactctgtgggagaagctacccttacactcaatgagattagagaaatttacttaatttggttggtggatatttatcataaaaaacccaatcagagaggcactaattgtcctaatgttgcgtggaaaaagggttgtcaagaatgggaaccagaggagttctctggttctaaagacgaattagactttaaatttgctattgttgattacaaacaacttactaaagtagggataactgtctacaaagaactgagttatagcaatgaccgtttagctgaatatagagggaagaaaggaaaccataaagttcagttcaagtataaccctgagtgtatggcagttatttgggtgttggatgaggatatgaatgagtactttacagttaatgcgattgactacgaatatgcaagtagagtatcactttggcaacataaatataacatgaaatatcaagcagaactaaattcagcagaatatgatgaggacaaggaaattgatgcagaaataaaaattgaagaaatcgcagatcgttcaattgttaagactaacaaaatcagagctcggaggcgtggcgctaggcatcaagagaatagcgcaagggctaagtcaatcagtaatgcgaacccggcctcgatacaaaaacatgaagatgaaatcgttagtgcagataatgacgattgggatattgattatgtctgagaaatcgtcaaatgagtgaaacgcgtgaggctcgtatatcaagagctaaaagggcatttgtatccacaccgagcgttaggaaaatcttgagttacatggatagatgtagagatctatcagacctagagtctgagcctacatgcatgatggtctatggtgcttcgggtgtaggtaaaacgaccgtcatcaagaaatacttaaatcaaaacagaagagagtccgaagccgggggcgatataataccggttttgcatattgagttgccagacaatgcgaagccagtagatgcagcaagggaattgctggttgaaatgggtgacccgctagcactttatgaaactgacttagctagattgacgaaaagactgactgaattaatccctgcggtcggcgtgaagctgattattatcgatgagttccaacatttggtggaagaaaggtcaaatcgggttcttacccaagtaggtaattggctaaaaatgatacttaacaaaacgaaatgtccaattgttatatttggtatgccatactcaaaagttgtactgcaagcaaactcgcaacttcacgggcgattttccattcaggttgaactgcgcccctttagctaccagggaggtagaggtgtatttaaaacttttttggaataccttgataaagccctaccttttgaaaaacaggctggcttagccaacgaaagtttgcagaaaaaattgtatgcattctctcagggaaacatgcgttcgttgagaaaccttatttatcaagcatctatcgaagcaattgataatcagcatgagacgataaccgaagaagatttcgtttttgcatcgaagttgacatcgggcgataaacccaactcatggaaaaatccttttgaggagggtgttgaggtaacagaagatatgttacgaccgccaccaaaagatattggttgggaggactatttgagacattcaaccccgagagtgagtaaaccaggtagaaataaaaactttttcgaataacctaggctgctgcgctgctgccaccgctgagcaataactagcataaccccttggggcctctaaacgggtcttgaggggttttttgctgaaacctcaggcattgaacctgcacggtaccgagctcgaattcactggccgtcgttttacaacgtcgtgactgggaaaaccctggcgttacccaacttaatcgccttgctatcgtggccggatcttgcggcccctcggcttgaacgaattgttagacattatttgccgactaccttggtgatctcgcctttcacgtagtggacaaattcttccaactgatctgcgcgcgaggccaagcgatcttcttcttgtccaagataagcctgtctagcttcaagtatgacgggctgatactgggccggcaggcgctccattgcccagtcggcagcgacatccttcggcgcgattttgccggttactgcgctgtaccaaatgcgggacaacgtaagcactacatttcgctcatcgccagcccagtcgggcggcgagttccatagcgttaaggtttcatttagcgcctcaaatagatcctgttcaggaaccggatcaaagagttcctccgccgctggacctaccaaggcaacgctatgttctcttgcttttgtcagcaagatagccagatcaatgtcgatcgtggctggctcgaagatacctgcaagaatgtcattgcgctgccattctccaaattgcagttcgcgcttagctggataacgccacggaatgatgtcgtcgtgcacaacaatggtgacttctacagcgcggagaatctcgctctctccaggggaagccgaagtttccaaaaggtcgttgatcaaagctcgccgcgttgtttcatcaagccttacggtcaccgtaaccagcaaatcaatatcactgtgtggcttcaggccgccatccactgcggagccgtacaaatgtacggccagcaacgtcggttcgagatggcgctcgatgacgccaactacctctgatagttgagtcgatacttcggcgatcaccgcttccctcatactcttcctttttcaatattattgaagcatttatcagggttattgtctcatgagcggatacatatttgaatgtatttagaaaaataaacaaatagctagctcactcggtcgctacgctccgggcgtgagactgcggcgggcgctgcggacacatacaaagttacccacagattccgtggataagcaggggactaacatgtgaggcaaaacagcagggccgcgccggtggcgtttttccataggctccgccctcctgccagagttcacataaacagacgcttttccggtgcatctgtgggagccgtgaggctcaaccatgaatctgacagtacgggcgaaacccgacaggacttaaagatccccaccgtttccggcgggtcgctccctcttgcgctctcctgttccgaccctgccgtttaccggatacctgttccgcctttctcccttacgggaagtgtggcgctttctcatagctcacacactggtatctcggctcggtgtaggtcgttcgctccaagctgggctgtaagcaagaactccccgttcagcccgactgctgcgccttatccggtaactgttcacttgagtccaacccggaaaagcacggtaaaacgccactggcagcagccattggtaactgggagttcgcagaggatttgtttagctaaacacgcggttgctcttgaagtgtgcgccaaagtccggctacactggaaggacagatttggttgctgtgctctgcgaaagccagttaccacggttaagcagttccccaactgacttaaccttcgatcaaaccacctccccaggtggttttttcgtttacagggcaaaagattacgcgcagaaaaaaaggatctcaagaagatcctttgatcttttctactgaaccgctctagatttcagtgcaatttatctcttcaaatgtagc

SEQ ID NO: 36 - DNA, 11860 bp, artificial sequence
  Synthetic
gcgctgcggacacatacaaagttacccacagattccgtggataagcaggggactaacatgtgaggcaaaacagcagggccgcgccggtggcgtttttccataggctccgccctcctgccagagttcacataaacagacgcttttccggtgcatctgtgggagccgtgaggctcaaccatgaatctgacagtacgggcgaaacccgacaggacttaaagatccccaccgtttccggcgggtcgctccctcttgcgctctcctgttccgaccctgccgtttaccggatacctgttccgcctttctcccttacgggaagtgtggcgctttctcatagctcacacactggtatctcggctcggtgtaggtcgttcgctccaagctgggctgtaagcaagaactccccgttcagcccgactgctgcgccttatccggtaactgttcacttgagtccaacccggaaaagcacggtaaaacgccactggcagcagccattggtaactgggagttcgcagaggatttgtttagctaaacacgcggttgctcttgaagtgtgcgccaaagtccggctacactggaaggacagatttggttgctgtgctctgcgaaagccagttaccacggttaagcagttccccaactgacttaaccttcgatcaaaccacctccccaggtggttttttcgtttacagggcaaaagattacgcgcagaaaaaaaggatctcaagaagatcctttgatcttttctactgaaccgctctagatttcagtgcaatttatctcttcaaatgtagcacctgaagtcagccccatacgatataagttgtaattctcatgttagtcatgccccgcgcccaccggaaggagctgactgggttgaaggctctcaagggcatcggtcgagatcccggtgcctaatgagtgagctaacttacattaattgcgttgcgctcactgcccgctttccagtcgggaaacctgtcgtgccagctgcattaatgaatcggccaacgcgcggggagaggcggtttgcgtattgggcgccagggtggtttttcttttcaccagtgagacgggcaacagctgattgcccttcaccgcctggccctgagagagttgcagcaagcggtccacgctggtttgccccagcaggcgaaaatcctgtttgatggtggttaacggcgggatataacatgagctgtcttcggtatcgtcgtatcccactaccgagatgtccgcaccaacgcgcagcccggactcggtaatggcgcgcattgcgcccagcgccatctgatcgttggcaaccagcatcgcagtgggaacgatgccctcattcagcatttgcatggtttgttgaaaaccggacatggcactccagtcgccttcccgttccgctatcggctgaatttgattgcgagtgagatatttatgccagccagccagacgcagacgcgccgagacagaacttaatgggcccgctaacagcgcgatttgctggtgacccaatgcgaccagatgctccacgcccagtcgcgtaccgtcttcatgggagaaaataatactgttgatgggtgtctggtcagagacatcaagaaataacgccggaacattagtgcaggcagcttccacagcaatggcatcctggtcatccagcggatagttaatgatcagcccactgacgcgttgcgcgagaagattgtgcaccgccgctttacaggcttcgacgccgcttcgttctaccatcgacaccaccacgctggcacccagttgatcggcgcgagatttaatcgccgcgacaatttgcgacggcgcgtgcagggccagactggaggtggcaacgccaatcagcaacgactgtttgcccgccagttgttgtgccacgcggttgggaatgtaattcagctccgccatcgccgcttccactttttcccgcgttttcgcagaaacgtggctggcctggttcaccacgcgggaaacggtctgataagagacaccggcatactctgcgacatcgtataacgttactggtttcacattcaccaccctgaattgactctcttccgggcgctatcatgccataccgcgaaaggttttgcgccattcgatggtgtccgggatctcgacgctctcccttatgcgactcctgcattaggaatggataaccgtattaccgcctttgagtgagctgataccgctcgccgcagccgaacgaccgagcgcagcgagtcagtgagcgaggacacaagctttgacagctagctcagtcctaggtataatactagcgtcgacgtggagatataccatgggtgaactgccgagtaggtagctgataacagtacagcgcggctgaaatcatcattaaagcggtgaactgccgagtaggtagctgataacggatccgaattcgagcgaaggagatatacatatgtttttgcaaagacctaaaccttacagcgatgaaagtttagaaagtttctttatccgagtggctaacaaaaatggctacggtgatgtccatcgcttcctagaagccactaaacgattccttcaagacattgaccataatggctatcaaacctttccgactgatataactcggataaacccatactcagctaaaaacagttccagcgcacgaactgcgtcattcctgaaacttgcacaattgacatttaatgaaccgccagagctacttgggttggcaattaacagaacaaacatgaaatactcgccgtcaactagcgcggttgttagaggtgcagaagtctttcctcgcagtttactacggacgcactccatcccctgctgtcctttgtgtctgcgagaaaatggctacgcctcctacctttggcactttcaggggtacgaatactgccacagccataacgtacctttaattaccacttgtagctgtggtaaggagtttgactaccgagtatctgggttaaagggcatttgctgcaaatgcaaggagcctatcaccttaaccagcagggagaacggtcatgaggcagcgtgtactgtttcaaactggcttgctggccatgaatctaaacctctgccaaatcttcctaaaagctaccgatggggtttagttcattggtggatgggtattaaagatagcgagttcgatcacttttcgttcgttcaatttttctcaaactggccaaggtcattccactcgataatcgaagatgaagtagagttcaaccttgagcatgctgttgtcagcacgtctgaattacgactaaaagatcttcttggtcgattgtttttcggttcaattcggttacctgagcggaatcttcaacacaatatcatccttggtgagcttctctgctatttagaaaatcgtttatggcaagacaagggattaatcgccaacctcaaaatgaacgcgttagaggcgactgtaatgttaaattgtagcctcgatcagattgcatcaatggttgaacaacgcatcttgaagccaaatcgaaaaagcaagcccaacagccctcttgatgttaccgattatctatttcatttcggcgatattttctgtctttggttagctgagttccaaagcgatgagtttaaccgttcgttttatgtgtcgaggtggtaaatgcaaactctgaaagaactaatcgcatccaatcctgacgacttaacaactgaacttaagagagcatttcgtccactcacaccgcatattgcaattgatggtaatgaacttgacgcactgacgatattagtcaatttaaccgataagactgatgatcagaaagacctgctcgatcgagccaaatgcaagcaaaaacttcgagatgaaaaatggtgggctagctgcataaattgcgttaattacagacaaagccataacccaaaattcccggatatacgttctgaaggcgtgattcgaacccaagccctgggtgaattaccgagtttcctactctcgtcctcaaaaatcccaccataccattggtcatatagccatgattcaaaatacgtcaacaaaagcgcattcctcaccaatgagttttgttgggatggtgagatctcatgtttgggtgagcttcttaaagatgcagatcacccactttggaatactttgaaaaagttaggttgttctcaaaaaacttgcaaagcaatggcaaaacaactagctgatattactctcacgactatcaatgtcacactcgcaccaaattacctgactcaaatatctctccccgatagtgatacatcctacatttcactctctcctgttgcatcgctatcgatgcaaagccactttcatcagaggctccaagatgaaaatcggcatagcgcgataacgcggtttagccgaactaccaacatgggggtcactgcgatgacatgtggcggcgcatttagaatgttaaagtctggcgctaagttttccagcccccctcatcaccgattaaacagtaaacgaagttggttgacgtcagagcatgttcagtcattaaaacagtaccagcgcctcaacaaaagcctcatacctgaaaactctcggattgcactccgtagaaaatacaaaatcgagcttcaaaatatggtcagatcttggtttgcaatgcaagaccatacccttgattcgaacatacttatccaacatttgaatcatgacctatcttacttaggagccacaaaacgttttgcatacgatccagcgatgaccaagctctttactgagcttttgaaacgagagttatcaaattcaatcaataatggtgagcaacacactaatggatcgtttttagtcctaccgaatatcagggtttgtggcgcaacagctttaagctccccggtaacggtggggattccatcacttacagctttctttggcttcgttcacgcatttgaacggaatataaatcgcaccacctcatcgtttcgtgttgaatcctttgcgatatgcgtccatcaactacatgtcgagaagcgaggtttgacagcagagtttgtggaaaaaggcgacgggactatatccgctcccgcgacccgggatgactggcagtgtgatgtcgtatttagccttattttgaacaccaactttgctcaacatattgaccaagatacgttagttacatcactaccaaagcgattggctcggggttcagcaaaaattgcgattgatgactttaaacatatcaactcattctcgacattagaaacagcgatcgaatctctgccaatagaagctggtaggtggttatcactttacgcacagtcaaacaataatctaagtgatctattagcagccatgacagaggaccatcagctcatggcaagctgcgtcggttaccacttgttagaagagcccaaagataaaccaaactccctcagaggttacaaacacgctatcgccgagtgcatcattggactcattaactcaatcacctttagctcagagactgatcccaacacaatcttttggtcgctaaagaactatcaaaactacctagtggtacagccaaggagtatcaacgatgaaactaccgacaaatctagcctatgagcgctctatcgacccatcagatgtctgtttttttgtcgtctggcccgatgatagaaaaacacctttaacctacaattctcgtactctgctcgggcaaatggaagcggcatcattagcctatgatgtctcaggtcaaccaataaaaagtgccaccgctgaggcgttagctcaagggaaccctcatcaagttgatttctgccacgttccatacggtgcgagtcatattgaatgcagtttctccgtctcgttttcttctgaactacgtcaaccatataagtgtaactcaagcaaagttaaacaaacgctagtgcaattagtcgagctctacgaaacgaaaatcggctggactgagctagcaacccgatatttgatgaacatttgcaacggtaaatggctgtggaaaaatacccgtaaagcctattgctggaacattgtacttacaccttggccttggaacggggaaaaggttggatttgaagatattcgtactaactacacctcacggcaagactttaaaaataataaaaattggtctgctatagttgaaatgatcaaaaccgcattttctagtactgatgggctggcgatatttgaagtcagggccaccttgcacttgccaacgaatgctatggtgcggccaagccaagttttcacagaaaaagaaagtggcagtaaaagtaaatctaaaactcaaaacagtcgagtttttcagagtacaactattgatggtgaacgatcgccaatactaggggcctttaaaacgggagcagctattgcaaccattgacgactggtatcctgaagccactgagccactaagggtcggacggtttggggttcatcgcgaagatgtcacttgctaccgtcatccgtctaccggaaaagattttttctcgatattacaacaagcagagcactatattgaagtgttgagcgccaacaaaactcccgctcaagaaactatcaacgacatgcactttttaatggctaacctgattaagggtgggatgttccagcataaaggagactgactgtgaaatggtattataagacaatcacctttctgccagagttgtgcaacaacgagtcactggctgcaaagtgtctccgcgttctgcatggatttaactatcagtatgagacacgaaatatcggcgtttcatttccgctttggtgtgatgcaacggttggaaaaaagatttcatttgtcagcaagaacaagatagaactcgacttactacttaaacaacactatttcgtccaaatggaacaacttcaatactttcatatatccaacactgttctcgtcccagaagattgtacatacgtttcctttagacgctgtcaatctatagataagctcacagcagcagggctggcaaggaaaatcagacgcctggagaaacgtgctctatctagaggcgagcaatttgacccatcatcttttgctcaaaaagagcatactgcaatagcgcactaccactcacttggggagtccagcaaacagacgaaccgcaactttcgactcaatatcaggatgctctcggagcaaccccgtgaggggaactcgatttttagtagctatggcttatcaaattcagaaaactcgtttcagcctgtacccttaatctgacctttaataaggagatataccatggcgacaagtttacctacgccctcagcaattacgacttcggcgttagagtatgcattccatactcccgctcgcaatctaacgaaatctcgcggaaaaaacattcatcgttatgtcagtgtaaagatgagtaagaggattacggtagaatctactctagagtgtgatgcctgctatcactttgattttgagccaagtattgttcgcttttgcgctcaaccgattcgatttttatattatctcaatggtcagtctcactcctatgttcctgactttctagttcaatttgataccaacgagtttgttctatatgaagtaaagtcagcttatgctaagaacaaacctgattttgatgttgaatgggaggcgaaagtaaaagcagcaactgaactagggctagaattggagcttgttgaagagagtgatattagggatacggttgtattaaataatcttaagcgcatgcatcgttatgcttcgaaagatgagctgaataacgtacataactctctcttaaaaataataaagtacaatggcgcccaatctgcaagatgcttgggagaacagttgggtttaaaaggccgaactgttttaccaattttgtgcgatttgctgtcaaggtgtttactcgatacacgtttggataagcctctatctcttgaatctcgatttgagttggccagttatggctaagaaagggttctcaagtttccatagaaaagcagtctcttcccaagatacgcttgaatcgatagagcttgtctctagcgctaattgtctagaaagtgttacgtatcaagatatatcagcatttcccgaaacaattgcggtagagattaatttccgattaagcattcttcgctttttagcgcgaaagtgcgaaaccattgtggccaaatcaattgaaccacatcgtgtagagctacagcaaaactatagtagaaaaatacccagtgcaataacgatatatcgatggtggcttgcttttcgaaaatcagactacaaccccattagcttagcacctaatatcaaggatagaggtaatagagagacaaaagtgtcaacagttgttgattctattatggaacaggcagttgaaagagttatatctggacgaaaagtcaatgttagctctgcatataaacgtgttcgacgaaaagttcgtcaatacaatctaactcatggaacgaaatacacgtatcctaagtacgaatctgtaagaaagcgagtaaaaaagaaaaccccatttgagttattagccgcagggaaaggggagagagtagctaagagagagtttcgccgaatgggaaaaaagatcctcacgtctagcgtgctagagagggttgaaatagatcacactgtcgttgacctttttgcagtacacgaagagtatcgaatcccattgggccgaccttggcttactcaattggttgattgttacagtaaagctgtaatcggtttttatttaggtttcgagcctcctagctatgtgtcggtttcccttgcacttaagaatgcaatacaacgcaaagatgacttaatctcctcgtatgaatcgatcgagaatgaatggctatgttatggcatcccagacctactcgtaactgataatggtaaagagtttttgtcgaaagcatttgatcaagcatgtgaatcactattgatcaatgtgcatcaaaataaagttgagacgcccgacaacaaacctcatgttgaacgtaactacgggactattaatacttctctgttagacgatttacctgggaaatccttcagccagtaccttcaaagagaagggtacgactctgtgggagaagctacccttacactcaatgagattagagaaatttacttaatttggttggtggatatttatcataaaaaacccaatcagagaggcactaattgtcctaatgttgcgtggaaaaagggttgtcaagaatgggaaccagaggagttctctggttctaaagacgaattagactttaaatttgctattgttgattacaaacaacttactaaagtagggataactgtctacaaagaactgagttatagcaatgaccgtttagctgaatatagagggaagaaaggaaaccataaagttcagttcaagtataaccctgagtgtatggcagttatttgggtgttggatgaggatatgaatgagtactttacagttaatgcgattgactacgaatatgcaagtagagtatcactttggcaacataaatataacatgaaatatcaagcagaactaaattcagcagaatatgatgaggacaaggaaattgatgcagaaataaaaattgaagaaatcgcagatcgttcaattgttaagactaacaaaatcagagctcggaggcgtggcgctaggcatcaagagaatagcgcaagggctaagtcaatcagtaatgcgaacccggcctcgatacaaaaacatgaagatgaaatcgttagtgcagataatgacgattgggatattgattatgtctgagaaatcgtcaaatgagtgaaacgcgtgaggctcgtatatcaagagctaaaagggcatttgtatccacaccgagcgttaggaaaatcttgagttacatggatagatgtagagatctatcagacctagagtctgagcctacatgcatgatggtctatggtgcttcgggtgtaggtaaaacgaccgtcatcaagaaatacttaaatcaaaacagaagagagtccgaagccgggggcgatataataccggttttgcatattgagttgccagacaatgcgaagccagtagatgcagcaagggaattgctggttgaaatgggtgacccgctagcactttatgaaactgacttagctagattgacgaaaagactgactgaattaatccctgcggtcggcgtgaagctgattattatcgatgagttccaacatttggtggaagaaaggtcaaatcgggttcttacccaagtaggtaattggctaaaaatgatacttaacaaaacgaaatgtccaattgttatatttggtatgccatactcaaaagttgtactgcaagcaaactcgcaacttcacgggcgattttccattcaggttgaactgcgcccctttagctaccagggaggtagaggtgtatttaaaacttttttggaataccttgataaagccctaccttttgaaaaacaggctggcttagccaacgaaagtttgcagaaaaaattgtatgcattctctcagggaaacatgcgttcgttgagaaaccttatttatcaagcatctatcgaagcaattgataatcagcatgagacgataaccgaagaagatttcgtttttgcatcgaagttgacatcgggcgataaacccaactcatggaaaaatccttttgaggagggtgttgaggtaacagaagatatgttacgaccgccaccaaaagatattggttgggaggactatttgagacattcaaccccgagagtgagtaaaccaggtagaaataaaaactttttcgaataacctaggctgctgcgctgctgccaccgctgagcaataactagcataaccccttggggcctctaaacgggtcttgaggggttttttgctgaaacctcaggcattgaacctgcacggtaccgagctcgaattcactggccgtcgttttacaacgtcgtgactgggaaaaccctggcgttacccaacttaatcgccttgctatcgtggccggatcttgcggcccctcggcttgaacgaattgttagacattatttgccgactaccttggtgatctcgcctttcacgtagtggacaaattcttccaactgatctgcgcgcgaggccaagcgatcttcttcttgtccaagataagcctgtctagcttcaagtatgacgggctgatactgggccggcaggcgctccattgcccagtcggcagcgacatccttcggcgcgattttgccggttactgcgctgtaccaaatgcgggacaacgtaagcactacatttcgctcatcgccagcccagtcgggcggcgagttccatagcgttaaggtttcatttagcgcctcaaatagatcctgttcaggaaccggatcaaagagttcctccgccgctggacctaccaaggcaacgctatgttctcttgcttttgtcagcaagatagccagatcaatgtcgatcgtggctggctcgaagatacctgcaagaatgtcattgcgctgccattctccaaattgcagttcgcgcttagctggataacgccacggaatgatgtcgtcgtgcacaacaatggtgacttctacagcgcggagaatctcgctctctccaggggaagccgaagtttccaaaaggtcgttgatcaaagctcgccgcgttgtttcatcaagccttacggtcaccgtaaccagcaaatcaatatcactgtgtggcttcaggccgccatccactgcggagccgtacaaatgtacggccagcaacgtcggttcgagatggcgctcgatgacgccaactacctctgatagttgagtcgatacttcggcgatcaccgcttccctcatactcttcctttttcaatattattgaagcatttatcagggttattgtctcatgagcggatacatatttgaatgtatttagaaaaataaacaaatagctagctcactcggtcgctacgctccgggcgtgagactgcggcgg

SEQ ID NO: 37 - DNA, 11860 bp, artificial sequence
  Synthetic
aacgtggctggcctggttcaccacgcgggaaacggtctgataagagacaccggcatactctgcgacatcgtataacgttactggtttcacattcaccaccctgaattgactctcttccgggcgctatcatgccataccgcgaaaggttttgcgccattcgatggtgtccgggatctcgacgctctcccttatgcgactcctgcattaggaatggataaccgtattaccgcctttgagtgagctgataccgctcgccgcagccgaacgaccgagcgcagcgagtcagtgagcgaggacacaagctttgacagctagctcagtcctaggtataatactagcgtcgacgtggagatataccatgggtgaactgccgagtaggtagctgataacgagaatattgtggcaaaagcgcataaggtgctgtgaactgccgagtaggtagctgataacggatccgaattcgagcgaaggagatatacatatgtttttgcaaagacctaaaccttacagcgatgaaagtttagaaagtttctttatccgagtggctaacaaaaatggctacggtgatgtccatcgcttcctagaagccactaaacgattccttcaagacattgaccataatggctatcaaacctttccgactgatataactcggataaacccatactcagctaaaaacagttccagcgcacgaactgcgtcattcctgaaacttgcacaattgacatttaatgaaccgccagagctacttgggttggcaattaacagaacaaacatgaaatactcgccgtcaactagcgcggttgttagaggtgcagaagtctttcctcgcagtttactacggacgcactccatcccctgctgtcctttgtgtctgcgagaaaatggctacgcctcctacctttggcactttcaggggtacgaatactgccacagccataacgtacctttaattaccacttgtagctgtggtaaggagtttgactaccgagtatctgggttaaagggcatttgctgcaaatgcaaggagcctatcaccttaaccagcagggagaacggtcatgaggcagcgtgtactgtttcaaactggcttgctggccatgaatctaaacctctgccaaatcttcctaaaagctaccgatggggtttagttcattggtggatgggtattaaagatagcgagttcgatcacttttcgttcgttcaatttttctcaaactggccaaggtcattccactcgataatcgaagatgaagtagagttcaaccttgagcatgctgttgtcagcacgtctgaattacgactaaaagatcttcttggtcgattgtttttcggttcaattcggttacctgagcggaatcttcaacacaatatcatccttggtgagcttctctgctatttagaaaatcgtttatggcaagacaagggattaatcgccaacctcaaaatgaacgcgttagaggcgactgtaatgttaaattgtagcctcgatcagattgcatcaatggttgaacaacgcatcttgaagccaaatcgaaaaagcaagcccaacagccctcttgatgttaccgattatctatttcatttcggcgatattttctgtctttggttagctgagttccaaagcgatgagtttaaccgttcgttttatgtgtcgaggtggtaaatgcaaactctgaaagaactaatcgcatccaatcctgacgacttaacaactgaacttaagagagcatttcgtccactcacaccgcatattgcaattgatggtaatgaacttgacgcactgacgatattagtcaatttaaccgataagactgatgatcagaaagacctgctcgatcgagccaaatgcaagcaaaaacttcgagatgaaaaatggtgggctagctgcataaattgcgttaattacagacaaagccataacccaaaattcccggatatacgttctgaaggcgtgattcgaacccaagccctgggtgaattaccgagtttcctactctcgtcctcaaaaatcccaccataccattggtcatatagccatgattcaaaatacgtcaacaaaagcgcattcctcaccaatgagttttgttgggatggtgagatctcatgtttgggtgagcttcttaaagatgcagatcacccactttggaatactttgaaaaagttaggttgttctcaaaaaacttgcaaagcaatggcaaaacaactagctgatattactctcacgactatcaatgtcacactcgcaccaaattacctgactcaaatatctctccccgatagtgatacatcctacatttcactctctcctgttgcatcgctatcgatgcaaagccactttcatcagaggctccaagatgaaaatcggcatagcgcgataacgcggtttagccgaactaccaacatgggggtcactgcgatgacatgtggcggcgcatttagaatgttaaagtctggcgctaagttttccagcccccctcatcaccgattaaacagtaaacgaagttggttgacgtcagagcatgttcagtcattaaaacagtaccagcgcctcaacaaaagcctcatacctgaaaactctcggattgcactccgtagaaaatacaaaatcgagcttcaaaatatggtcagatcttggtttgcaatgcaagaccatacccttgattcgaacatacttatccaacatttgaatcatgacctatcttacttaggagccacaaaacgttttgcatacgatccagcgatgaccaagctctttactgagcttttgaaacgagagttatcaaattcaatcaataatggtgagcaacacactaatggatcgtttttagtcctaccgaatatcagggtttgtggcgcaacagctttaagctccccggtaacggtggggattccatcacttacagctttctttggcttcgttcacgcatttgaacggaatataaatcgcaccacctcatcgtttcgtgttgaatcctttgcgatatgcgtccatcaactacatgtcgagaagcgaggtttgacagcagagtttgtggaaaaaggcgacgggactatatccgctcccgcgacccgggatgactggcagtgtgatgtcgtatttagccttattttgaacaccaactttgctcaacatattgaccaagatacgttagttacatcactaccaaagcgattggctcggggttcagcaaaaattgcgattgatgactttaaacatatcaactcattctcgacattagaaacagcgatcgaatctctgccaatagaagctggtaggtggttatcactttacgcacagtcaaacaataatctaagtgatctattagcagccatgacagaggaccatcagctcatggcaagctgcgtcggttaccacttgttagaagagcccaaagataaaccaaactccctcagaggttacaaacacgctatcgccgagtgcatcattggactcattaactcaatcacctttagctcagagactgatcccaacacaatcttttggtcgctaaagaactatcaaaactacctagtggtacagccaaggagtatcaacgatgaaactaccgacaaatctagcctatgagcgctctatcgacccatcagatgtctgtttttttgtcgtctggcccgatgatagaaaaacacctttaacctacaattctcgtactctgctcgggcaaatggaagcggcatcattagcctatgatgtctcaggtcaaccaataaaaagtgccaccgctgaggcgttagctcaagggaaccctcatcaagttgatttctgccacgttccatacggtgcgagtcatattgaatgcagtttctccgtctcgttttcttctgaactacgtcaaccatataagtgtaactcaagcaaagttaaacaaacgctagtgcaattagtcgagctctacgaaacgaaaatcggctggactgagctagcaacccgatatttgatgaacatttgcaacggtaaatggctgtggaaaaatacccgtaaagcctattgctggaacattgtacttacaccttggccttggaacggggaaaaggttggatttgaagatattcgtactaactacacctcacggcaagactttaaaaataataaaaattggtctgctatagttgaaatgatcaaaaccgcattttctagtactgatgggctggcgatatttgaagtcagggccaccttgcacttgccaacgaatgctatggtgcggccaagccaagttttcacagaaaaagaaagtggcagtaaaagtaaatctaaaactcaaaacagtcgagtttttcagagtacaactattgatggtgaacgatcgccaatactaggggcctttaaaacgggagcagctattgcaaccattgacgactggtatcctgaagccactgagccactaagggtcggacggtttggggttcatcgcgaagatgtcacttgctaccgtcatccgtctaccggaaaagattttttctcgatattacaacaagcagagcactatattgaagtgttgagcgccaacaaaactcccgctcaagaaactatcaacgacatgcactttttaatggctaacctgattaagggtgggatgttccagcataaaggagactgactgtgaaatggtattataagacaatcacctttctgccagagttgtgcaacaacgagtcactggctgcaaagtgtctccgcgttctgcatggatttaactatcagtatgagacacgaaatatcggcgtttcatttccgctttggtgtgatgcaacggttggaaaaaagatttcatttgtcagcaagaacaagatagaactcgacttactacttaaacaacactatttcgtccaaatggaacaacttcaatactttcatatatccaacactgttctcgtcccagaagattgtacatacgtttcctttagacgctgtcaatctatagataagctcacagcagcagggctggcaaggaaaatcagacgcctggagaaacgtgctctatctagaggcgagcaatttgacccatcatcttttgctcaaaaagagcatactgcaatagcgcactaccactcacttggggagtccagcaaacagacgaaccgcaactttcgactcaatatcaggatgctctcggagcaaccccgtgaggggaactcgatttttagtagctatggcttatcaaattcagaaaactcgtttcagcctgtacccttaatctgacctttaataaggagatataccatggcgacaagtttacctacgccctcagcaattacgacttcggcgttagagtatgcattccatactcccgctcgcaatctaacgaaatctcgcggaaaaaacattcatcgttatgtcagtgtaaagatgagtaagaggattacggtagaatctactctagagtgtgatgcctgctatcactttgattttgagccaagtattgttcgcttttgcgctcaaccgattcgatttttatattatctcaatggtcagtctcactcctatgttcctgactttctagttcaatttgataccaacgagtttgttctatatgaagtaaagtcagcttatgctaagaacaaacctgattttgatgttgaatgggaggcgaaagtaaaagcagcaactgaactagggctagaattggagcttgttgaagagagtgatattagggatacggttgtattaaataatcttaagcgcatgcatcgttatgcttcgaaagatgagctgaataacgtacataactctctcttaaaaataataaagtacaatggcgcccaatctgcaagatgcttgggagaacagttgggtttaaaaggccgaactgttttaccaattttgtgcgatttgctgtcaaggtgtttactcgatacacgtttggataagcctctatctcttgaatctcgatttgagttggccagttatggctaagaaagggttctcaagtttccatagaaaagcagtctcttcccaagatacgcttgaatcgatagagcttgtctctagcgctaattgtctagaaagtgttacgtatcaagatatatcagcatttcccgaaacaattgcggtagagattaatttccgattaagcattcttcgctttttagcgcgaaagtgcgaaaccattgtggccaaatcaattgaaccacatcgtgtagagctacagcaaaactatagtagaaaaatacccagtgcaataacgatatatcgatggtggcttgcttttcgaaaatcagactacaaccccattagcttagcacctaatatcaaggatagaggtaatagagagacaaaagtgtcaacagttgttgattctattatggaacaggcagttgaaagagttatatctggacgaaaagtcaatgttagctctgcatataaacgtgttcgacgaaaagttcgtcaatacaatctaactcatggaacgaaatacacgtatcctaagtacgaatctgtaagaaagcgagtaaaaaagaaaaccccatttgagttattagccgcagggaaaggggagagagtagctaagagagagtttcgccgaatgggaaaaaagatcctcacgtctagcgtgctagagagggttgaaatagatcacactgtcgttgacctttttgcagtacacgaagagtatcgaatcccattgggccgaccttggcttactcaattggttgattgttacagtaaagctgtaatcggtttttatttaggtttcgagcctcctagctatgtgtcggtttcccttgcacttaagaatgcaatacaacgcaaagatgacttaatctcctcgtatgaatcgatcgagaatgaatggctatgttatggcatcccagacctactcgtaactgataatggtaaagagtttttgtcgaaagcatttgatcaagcatgtgaatcactattgatcaatgtgcatcaaaataaagttgagacgcccgacaacaaacctcatgttgaacgtaactacgggactattaatacttctctgttagacgatttacctgggaaatccttcagccagtaccttcaaagagaagggtacgactctgtgggagaagctacccttacactcaatgagattagagaaatttacttaatttggttggtggatatttatcataaaaaacccaatcagagaggcactaattgtcctaatgttgcgtggaaaaagggttgtcaagaatgggaaccagaggagttctctggttctaaagacgaattagactttaaatttgctattgttgattacaaacaacttactaaagtagggataactgtctacaaagaactgagttatagcaatgaccgtttagctgaatatagagggaagaaaggaaaccataaagttcagttcaagtataaccctgagtgtatggcagttatttgggtgttggatgaggatatgaatgagtactttacagttaatgcgattgactacgaatatgcaagtagagtatcactttggcaacataaatataacatgaaatatcaagcagaactaaattcagcagaatatgatgaggacaaggaaattgatgcagaaataaaaattgaagaaatcgcagatcgttcaattgttaagactaacaaaatcagagctcggaggcgtggcgctaggcatcaagagaatagcgcaagggctaagtcaatcagtaatgcgaacccggcctcgatacaaaaacatgaagatgaaatcgttagtgcagataatgacgattgggatattgattatgtctgagaaatcgtcaaatgagtgaaacgcgtgaggctcgtatatcaagagctaaaagggcatttgtatccacaccgagcgttaggaaaatcttgagttacatggatagatgtagagatctatcagacctagagtctgagcctacatgcatgatggtctatggtgcttcgggtgtaggtaaaacgaccgtcatcaagaaatacttaaatcaaaacagaagagagtccgaagccgggggcgatataataccggttttgcatattgagttgccagacaatgcgaagccagtagatgcagcaagggaattgctggttgaaatgggtgacccgctagcactttatgaaactgacttagctagattgacgaaaagactgactgaattaatccctgcggtcggcgtgaagctgattattatcgatgagttccaacatttggtggaagaaaggtcaaatcgggttcttacccaagtaggtaattggctaaaaatgatacttaacaaaacgaaatgtccaattgttatatttggtatgccatactcaaaagttgtactgcaagcaaactcgcaacttcacgggcgattttccattcaggttgaactgcgcccctttagctaccagggaggtagaggtgtatttaaaacttttttggaataccttgataaagccctaccttttgaaaaacaggctggcttagccaacgaaagtttgcagaaaaaattgtatgcattctctcagggaaacatgcgttcgttgagaaaccttatttatcaagcatctatcgaagcaattgataatcagcatgagacgataaccgaagaagatttcgtttttgcatcgaagttgacatcgggcgataaacccaactcatggaaaaatccttttgaggagggtgttgaggtaacagaagatatgttacgaccgccaccaaaagatattggttgggaggactatttgagacattcaaccccgagagtgagtaaaccaggtagaaataaaaactttttcgaataacctaggctgctgcgctgctgccaccgctgagcaataactagcataaccccttggggcctctaaacgggtcttgaggggttttttgctgaaacctcaggcattgaacctgcacggtaccgagctcgaattcactggccgtcgttttacaacgtcgtgactgggaaaaccctggcgttacccaacttaatcgccttgctatcgtggccggatcttgcggcccctcggcttgaacgaattgttagacattatttgccgactaccttggtgatctcgcctttcacgtagtggacaaattcttccaactgatctgcgcgcgaggccaagcgatcttcttcttgtccaagataagcctgtctagcttcaagtatgacgggctgatactgggccggcaggcgctccattgcccagtcggcagcgacatccttcggcgcgattttgccggttactgcgctgtaccaaatgcgggacaacgtaagcactacatttcgctcatcgccagcccagtcgggcggcgagttccatagcgttaaggtttcatttagcgcctcaaatagatcctgttcaggaaccggatcaaagagttcctccgccgctggacctaccaaggcaacgctatgttctcttgcttttgtcagcaagatagccagatcaatgtcgatcgtggctggctcgaagatacctgcaagaatgtcattgcgctgccattctccaaattgcagttcgcgcttagctggataacgccacggaatgatgtcgtcgtgcacaacaatggtgacttctacagcgcggagaatctcgctctctccaggggaagccgaagtttccaaaaggtcgttgatcaaagctcgccgcgttgtttcatcaagccttacggtcaccgtaaccagcaaatcaatatcactgtgtggcttcaggccgccatccactgcggagccgtacaaatgtacggccagcaacgtcggttcgagatggcgctcgatgacgccaactacctctgatagttgagtcgatacttcggcgatcaccgcttccctcatactcttcctttttcaatattattgaagcatttatcagggttattgtctcatgagcggatacatatttgaatgtatttagaaaaataaacaaatagctagctcactcggtcgctacgctccgggcgtgagactgcggcgggcgctgcggacacatacaaagttacccacagattccgtggataagcaggggactaacatgtgaggcaaaacagcagggccgcgccggtggcgtttttccataggctccgccctcctgccagagttcacataaacagacgcttttccggtgcatctgtgggagccgtgaggctcaaccatgaatctgacagtacgggcgaaacccgacaggacttaaagatccccaccgtttccggcgggtcgctccctcttgcgctctcctgttccgaccctgccgtttaccggatacctgttccgcctttctcccttacgggaagtgtggcgctttctcatagctcacacactggtatctcggctcggtgtaggtcgttcgctccaagctgggctgtaagcaagaactccccgttcagcccgactgctgcgccttatccggtaactgttcacttgagtccaacccggaaaagcacggtaaaacgccactggcagcagccattggtaactgggagttcgcagaggatttgtttagctaaacacgcggttgctcttgaagtgtgcgccaaagtccggctacactggaaggacagatttggttgctgtgctctgcgaaagccagttaccacggttaagcagttccccaactgacttaaccttcgatcaaaccacctccccaggtggttttttcgtttacagggcaaaagattacgcgcagaaaaaaaggatctcaagaagatcctttgatcttttctactgaaccgctctagatttcagtgcaatttatctcttcaaatgtagcacctgaagtcagccccatacgatataagttgtaattctcatgttagtcatgccccgcgcccaccggaaggagctgactgggttgaaggctctcaagggcatcggtcgagatcccggtgcctaatgagtgagctaacttacattaattgcgttgcgctcactgcccgctttccagtcgggaaacctgtcgtgccagctgcattaatgaatcggccaacgcgcggggagaggcggtttgcgtattgggcgccagggtggtttttcttttcaccagtgagacgggcaacagctgattgcccttcaccgcctggccctgagagagttgcagcaagcggtccacgctggtttgccccagcaggcgaaaatcctgtttgatggtggttaacggcgggatataacatgagctgtcttcggtatcgtcgtatcccactaccgagatgtccgcaccaacgcgcagcccggactcggtaatggcgcgcattgcgcccagcgccatctgatcgttggcaaccagcatcgcagtgggaacgatgccctcattcagcatttgcatggtttgttgaaaaccggacatggcactccagtcgccttcccgttccgctatcggctgaatttgattgcgagtgagatatttatgccagccagccagacgcagacgcgccgagacagaacttaatgggcccgctaacagcgcgatttgctggtgacccaatgcgaccagatgctccacgcccagtcgcgtaccgtcttcatgggagaaaataatactgttgatgggtgtctggtcagagacatcaagaaataacgccggaacattagtgcaggcagcttccacagcaatggcatcctggtcatccagcggatagttaatgatcagcccactgacgcgttgcgcgagaagattgtgcaccgccgctttacaggcttcgacgccgcttcgttctaccatcgacaccaccacgctggcacccagttgatcggcgcgagatttaatcgccgcgacaatttgcgacggcgcgtgcagggccagactggaggtggcaacgccaatcagcaacgactgtttgcccgccagttgttgtgccacgcggttgggaatgtaattcagctccgccatcgccgcttccactttttcccgcgttttcgcaga

SEQ ID NO: 38 - DNA, 4978 bp, artificial sequence
  Synthetic
gacgaaagggcctcgtgatacgcctatttttataggttaatgtcatgataataatggtttcttagacgtcaggtggcacttttcggggaaatgtgcgcggaacccctatttgtttatttttctaaatacattcaaatatgtatccgctcatgagacaataaccctgataaatgcttcaataatattgaaaaaggaagagtatgagtattcaacatttccgtgtcgcccttattcccttttttgcggcattttgccttcctgtttttgctcacccagaaacgctggtgaaagtaaaagatgctgaagatcagttgggtgcacgagtgggttacatcgaactggatctcaacagcggtaagatccttgagagttttcgccccgaagaacgttttccaatgatgagcacttttaaagttctgctatgtggcgcggtattatcccgtattgacgccgggcaagagcaactcggtcgccgcatacactattctcagaatgacttggttgagtactcaccagtcacagaaaagcatcttacggatggcatgacagtaagagaattatgcagtgctgccataaccatgagtgataacactgcggccaacttacttctgacaacgatcggaggaccgaaggagctaaccgcttttttgcacaacatgggggatcatgtaactcgccttgatcgttgggaaccggagctgaatgaagccataccaaacgacgagcgtgacaccacgatgcctgtagcaatggcaacaacgttgcgcaaactattaactggcgaactacttactctagcttcccggcaacaattaatagactggatggaggcggataaagttgcaggaccacttctgcgctcggcccttccggctggctggtttattgctgataaatctggagccggtgagcgtggctctcgcggtatcattgcagcactggggccagatggtaagccctcccgtatcgtagttatctacacgacggggagtcaggcaactatggatgaacgaaatagacagatcgctgagataggtgcctcactgattaagcattggtaactgtcagaccaagtttactcatatatactttagattgatttaaaacttcatttttaatttaaaaggatctaggtgaagatcctttttgataatctcatgaccaaaatcccttaacgtgagttttcgttccactgagcgtcagaccccgtagaaaagatcaaaggatcttcttgagatcctttttttctgcgcgtaatctgctgcttgcaaacaaaaaaaccaccgctaccagcggtggtttgtttgccggatcaagagctaccaactctttttccgaaggtaactggcttcagcagagcgcagataccaaatactgttcttctagtgtagccgtagttaggccaccacttcaagaactctgtagcaccgcctacatacctcgctctgctaatcctgttaccagtggctgctgccagtggcgataagtcgtgtcttaccgggttggactcaagacgatagttaccggataaggcgcagcggtcgggctgaacggggggttcgtgcacacagcccagcttggagcgaacgacctacaccgaactgagatacctacagcgtgagctatgagaaagcgccacgcttcccgaagggagaaaggcggacaggtatccggtaagcggcagggtcggaacaggagagcgcacgagggagcttccagggggaaacgcctggtatctttatagtcctgtcgggtttcgccacctctgacttgagcgtcgatttttgtgatgctcgtcaggggggcggagcctatggaaaaacgccagcaacgcggcctttttacggttcctggccttttgctggccttttgctcacatgttctttcctgcgttatcccctgattctgtggataaccgtattaccgcctttgagtgagctgataccgctcgccgcagccgaactaccgagcgcagcgagtcagtgagcgaggaagcggaagagcgcccaatacgcaaaccgcctctccccgcgcgttggccgattcattaatgcagcccaagctttgttgatacaaccataaaatgataattacacccataaattgataattatcacacccataaattgatattgcctcttcatggtctaaacttcagtaagtttacgacattttcctcgaggtcatttccggggtacagctcgtccatgccgagagtgatcccggcggcggtcacgaactccagcaggaccatgtgatcgcgcttctcgttggggtctttgctcagggcggactgggtgctcaggtagtggttgtcgggcagcagcacggggccgtcgccgatgggggtgttctgctggtagtggtcggcgagctgcacgctgccgtcctcgatgttgtggcggatcttgaagttcaccttgatgccgttcttctgcttgtcggccatgatatagacgttgtggctgttgtagttgtactccagcttgtgccccaggatgttgccgtcctccttgaagtcgatgcccttcagctcgatgcggttcaccagggtgtcgccctcgaacttcacctcggcgcgggtcttgtagttgccgtcgtccttgaagaagatggtgcgctcctggacgtagccttcgggcatggcggacttgaagaagtcgtgctgcttcatgtggtcggggtagcggctgaagcactgcacgccgtaggtcagggtggtcacgagggtgggccagggcacgggcagcttgccggtggtgcagatgaacttcagggtcagcttgccgtaggtggcatcgccctcgccctcgccggacacgctgaacttgtggccgtttacgtcgccgtccagctcgaccaggatgggcaccaccccggtgaacagctcctcgcccttgctcactgggccaggattctcctcgacgtcaccgcatgttagcagacttcctctgccctctccactgccgaattcctttttcttttttgcctggccggcctttttcgtggccgccggccttttgtcgcctcccagctgagacaggtcgatccgtgtctcgtacaggccggtgatgctctggtggatcagggtggcgtccagcacctctttggtgctggtgtacctcttccggtcgatggtggtgtcaaagtacttgaaggcggcaggggctcccagattggtcagggtaaacaggtggatgatattctcggcctgctctctgatgggcttatcccggtgcttgttgtaggcggacagcactttgtccagattagcgtcggccaggatcactctcttggagaactcgctgatctgctcgatgatctcgtccaggtagtgcttgtgctgttccacaaacagctgtttctgctcattatcctcgggggagcccttcagcttctcatagtggctggccaggtacaggaagttcacatatttggagggcagggccagttcgtttcccttctgcagttcgccggcagaggccagcattctcttccggccgttttccagctcgaacagggagtacttaggcagcttgatgatcaggtcctttttcacttctttgtagcccttggcttccagaaagtcgatgggattcttctcgaagctgcttctttccatgatggtgatccccagcagctctttcacactcttcagtttcttggacttgcccttttccactttggccaccaccagcacagaataggccacggtggggctgtcgaagccgccgtacttcttagggtcccagtccttctttctggcgatcagcttatcgctgttcctcttgggcaggatagactctttgctgaagccgcctgtctgcacctcggtctttttcacgatattcacttggggcatgctcagcactttccgcacggtggcaaaatcccggcccttatcccacacgatctccccggtttcgccgtttgtctcgatcagaggccgcttccggatctcgccgttggccagggtaatctcggtcttgaaaaagttcatgatgttgctgtagaagaagtacttggcggtagccttgccgatttcctgctcgctcttggcgatcatcttccgcacgtcgtacaccttgtagtcgccgtacacgaactcgctttccagcttagggtactttttgatcagggcggttcccacgacggcgttcaggtaggcgtcgtgggcgtggtggtagttgttgatctcgcgcactttgtaaaactggaaatccttccggaaatcggacaccagcttggacttcagggtgatcactttcacttcccggatcagcttgtcattctcgtcgtacttagtgttcatccgggagtccaggatctgtgccacgtgctttgtgatctgccgggtttccaccagctgtctcttgatgaagccggccttatccagttcgctcaggccttgtctagagtccttactgcagtagttttgctgaaatactcgattcacaaaaatatcaacttatggttgttttgtgagatatcaatatatggttgttttgtggttaagttgctgattataaataattattaaatatcactttatggttgcatcaacaggtaccgagctcgaattcactggccgtcgttttacaacgtcgtgactgggaaaaccctggcgttacccaacttaatcgccttgcagcacatccccctttcgccagctggcgtaatagcgaagaggcccgcaccgatcgcccttcccaacagttgcgcagcctgaatggcgaatggcgcctgatgcggtattttctccttacgcatctgtgcggtatttcacaccgcatatggtgcactctcagtacaatctgctctgatgccgcatagttaagccagccccgacacccgccaacacccgctgacgcgccctgacgggcttgtctgctcccggcatccgcttacagacaagctgtgaccgtctccgggagctgcatgtgtcagaggttttcaccgtcatcaccgaaacgcgcga

SEQ ID NO: 39 - DNA, 7794 bp, artificial sequence
  Synthetic
gacgaaagggcctcgtgatacgcctatttttataggttaatgtcatgataataatggtttcttagacgtcaggtggcacttttcggggaaatgtgcgcggaacccctatttgtttatttttctaaatacattcaaatatgtatccgctcatgagacaataaccctgataaatgcttcaataatattgaaaaaggaagagtatgagtattcaacatttccgtgtcgcccttattcccttttttgcggcattttgccttcctgtttttgctcacccagaaacgctggtgaaagtaaaagatgctgaagatcagttgggtgcacgagtgggttacatcgaactggatctcaacagcggtaagatccttgagagttttcgccccgaagaacgttttccaatgatgagcacttttaaagttctgctatgtggcgcggtattatcccgtattgacgccgggcaagagcaactcggtcgccgcatacactattctcagaatgacttggttgagtactcaccagtcacagaaaagcatcttacggatggcatgacagtaagagaattatgcagtgctgccataaccatgagtgataacactgcggccaacttacttctgacaacgatcggaggaccgaaggagctaaccgcttttttgcacaacatgggggatcatgtaactcgccttgatcgttgggaaccggagctgaatgaagccataccaaacgacgagcgtgacaccacgatgcctgtagcaatggcaacaacgttgcgcaaactattaactggcgaactacttactctagcttcccggcaacaattaatagactggatggaggcggataaagttgcaggaccacttctgcgctcggcccttccggctggctggtttattgctgataaatctggagccggtgagcgtggctctcgcggtatcattgcagcactggggccagatggtaagccctcccgtatcgtagttatctacacgacggggagtcaggcaactatggatgaacgaaatagacagatcgctgagataggtgcctcactgattaagcattggtaactgtcagaccaagtttactcatatatactttagattgatttaaaacttcatttttaatttaaaaggatctaggtgaagatcctttttgataatctcatgaccaaaatcccttaacgtgagttttcgttccactgagcgtcagaccccgtagaaaagatcaaaggatcttcttgagatcctttttttctgcgcgtaatctgctgcttgcaaacaaaaaaaccaccgctaccagcggtggtttgtttgccggatcaagagctaccaactctttttccgaaggtaactggcttcagcagagcgcagataccaaatactgttcttctagtgtagccgtagttaggccaccacttcaagaactctgtagcaccgcctacatacctcgctctgctaatcctgttaccagtggctgctgccagtggcgataagtcgtgtcttaccgggttggactcaagacgatagttaccggataaggcgcagcggtcgggctgaacggggggttcgtgcacacagcccagcttggagcgaacgacctacaccgaactgagatacctacagcgtgagctatgagaaagcgccacgcttcccgaagggagaaaggcggacaggtatccggtaagcggcagggtcggaacaggagagcgcacgagggagcttccagggggaaacgcctggtatctttatagtcctgtcgggtttcgccacctctgacttgagcgtcgatttttgtgatgctcgtcaggggggcggagcctatggaaaaacgccagcaacgcggcctttttacggttcctggccttttgctggccttttgctcacatgttctttcctgcgttatcccctgattctgtggataaccgtattaccgcctttgagtgagctgataccgctcgccgcagccgaactaccgagcgcagcgagtcagtgagcgaggaagcggaagagcgcccaatacgcaaaccgcctctccccgcgcgttggccgattcattaatgcagcccaagctttgttgatacaaccataaaatgataattacacccataaattgataattatcacacccataaattgatattgcctcttcatggtctaaacttcagtaagtttacgacattttcctcgaggtcatttccggggtacagctcgtccatgccgagagtgatcccggcggcggtcacgaactccagcaggaccatgtgatcgcgcttctcgttggggtctttgctcagggcggactgggtgctcaggtagtggttgtcgggcagcagcacggggccgtcgccgatgggggtgttctgctggtagtggtcggcgagctgcacgctgccgtcctcgatgttgtggcggatcttgaagttcaccttgatgccgttcttctgcttgtcggccatgatatagacgttgtggctgttgtagttgtactccagcttgtgccccaggatgttgccgtcctccttgaagtcgatgcccttcagctcgatgcggttcaccagggtgtcgccctcgaacttcacctcggcgcgggtcttgtagttgccgtcgtccttgaagaagatggtgcgctcctggacgtagccttcgggcatggcggacttgaagaagtcgtgctgcttcatgtggtcggggtagcggctgaagcactgcacgccgtaggtcagggtggtcacgagggtgggccagggcacgggcagcttgccggtggtgcagatgaacttcagggtcagcttgccgtaggtggcatcgccctcgccctcgccggacacgctgaacttgtggccgtttacgtcgccgtccagctcgaccaggatgggcaccaccccggtgaacagctcctcgcccttgctcactgggccaggattctcctcgacgtcaccgcatgttagcagacttcctctgccctctccactgccgaattcctttttcttttttgcctggccggcctttttcgtggccgccggccttttgtcgcctcccagctgagacaggtcgatccgtgtctcgtacaggccggtgatgctctggtggatcagggtggcgtccagcacctctttggtgctggtgtacctcttccggtcgatggtggtgtcaaagtacttgaaggcggcaggggctcccagattggtcagggtaaacaggtggatgatattctcggcctgctctctgatgggcttatcccggtgcttgttgtaggcggacagcactttgtccagattagcgtcggccaggatcactctcttggagaactcgctgatctgctcgatgatctcgtccaggtagtgcttgtgctgttccacaaacagctgtttctgctcattatcctcgggggagcccttcagcttctcatagtggctggccaggtacaggaagttcacatatttggagggcagggccagttcgtttcccttctgcagttcgccggcagaggccagcattctcttccggccgttttccagctcgaacagggagtacttaggcagcttgatgatcaggtcctttttcacttctttgtagcccttggcttccagaaagtcgatgggattcttctcgaagctgcttctttccatgatggtgatccccagcagctctttcacactcttcagtttcttggacttgcccttttccactttggccaccaccagcacagaataggccacggtggggctgtcgaagccgccgtacttcttagggtcccagtccttctttctggcgatcagcttatcgctgttcctcttgggcaggatagactctttgctgaagccgcctgtctgcacctcggtctttttcacgatattcacttggggcatgctcagcactttccgcacggtggcaaaatcccggcccttatcccacacgatctccccggtttcgccgtttgtctcgatcagaggccgcttccggatctcgccgttggccagggtaatctcggtcttgaaaaagttcatgatgttgctgtagaagaagtacttggcggtagccttgccgatttcctgctcgctcttggcgatcatcttccgcacgtcgtacaccttgtagtcgccgtacacgaactcgctttccagcttagggtactttttgatcagggcggttcccacgacggcgttcaggtaggcgtcgtgggcgtggtggtagttgttgatctcgcgcactttgtaaaactggaaatccttccggaaatcggacaccagcttggacttcagggtgatcactttcacttcccggatcagcttgtcattctcgtcgtacttagtgttcatccgggagtccaggatctgtgccacgtgctttgtgatctgccgggtttccaccagctgtctcttgatgaagccggccttatccagttcgctcaggccgcctctctcggccttggtcagattgtcgaactttctctgggtaatcagcttggcgttcagcagctgccgccagtagttcttcatcttcttcacgacctcttcggagggcacgttgtcgctcttgccccggttcttgtcgcttctggtcagcaccttgttgtcgatggagtcgtccttcagaaagctctgaggcacgatatggtccacatcgtagtcggacagccggttgatgtccagttcctggtccacgtacatatcccgcccattctgcaggtagtacaggtacagcttctcgttctgcagctgggtgttttccacggggtgttctttcaggatctggctgcccagctctttgatgccctcttcgatccgcttcattctctcgcggctgttcttctgtcccttctgggtggtctggttctctctggccatttcgatcacgatgttctcgggcttgtgccggcccatcactttcacgagctcgtccaccaccttcactgtctgcaggatgcccttcttaatggcggggctgccggccagattggcaatgtgctcgtgcaggctatcgccctggccggacacctgggctttctggatgtcctctttaaaggtcaggctgtcgtcgtggatcagctgcatgaagtttctgttggcgaagccgtcggacttcaggaaatccaggattgtcttgccggactgcttgtcccggatgccgttgatcagcttccggctcagcctgccccagccggtgtatctccgccgcttcagctgcttcatcactttgtcgtcgaacaggtgggcataggttttcagccgttcctcgatcatctctctgtcctcaaacagtgtcagggtcagcacgatatcttccagaatgtcctcgttttcctcattgtccaggaagtccttgtccttgataattttcagcagatcgtggtatgtgcccagggaggcgttgaaccgatcttccacgccggagatttccacggagtcgaagcactcgattttcttgaagtagtcctctttcagctgcttcacggtcactttccggttggtcttgaacagcaggtccacgatggcctttttctgctcgccgctcaggaaggcgggctttctcattccctcggtcacgtatttcactttggtcagctcgttatacacggtgaagtactcgtacagcaggctgtgcttgggcagcaccttctcgttgggcaggttcttatcgaagttggtcatccgctcgatgaagctctgggcggaagcgcccttgtccaccacttcctcgaagttccagggggtgatggtttcctcgctctttctggtcatccaggcgaatctgctgtttcccctggccagagggcccacgtagtaggggatgcggaaggtcaggatcttctcgatcttttcccggttgtccttcaggaatgggtaaaaatcttcctgccgccgcagaatggcgtgcagctctcccaggtggatctggtgggggatgctgccgttgtcgaaggtccgctgcttccgcagcaggtcctctctgttcagcttcacgagcagttcctcggtgccgtccatcttttccaggatgggcttgatgaacttgtagaactcttcctggctggctccgccgtcaatgtagccggcgtagccgttcttgctctggtcgaagaaaatctctttgtacttctcaggcagctgctgccgcacgagagctttcagcagggtcaggtcctggtggtgctcgtcgtatctcttgatcatagaggcgctcaggggggccttggtgatctcggtgttcactctcaggatgtcgctcagcaggatggcgtcggacaggttcttggcggccagaaacaggtcggcgtactggtcgccgatctgggccagcaggttgtccaggtcgtcgtcgtaggtgtccttgctcagctgcagtttggcatcctcggccaggtcgaagttgctcttgaagttgggggtcaggcccaggctcagggcaatcaggtttccgaacaggccattcttcttctcgccgggcagctgggcgatcagattttccagccgtctgctcttgctcagtctggcagacaggatggccttggcgtccacgccgctggcgttgatggggttttcctcgaacagctggttgtaggtctgcaccagctggatgaacagcttgtccacgtcgctgttgtcggggttcaggtcgccctcgatcaggaagtggccccggaacttgatcatgtgggccagggccagatagatcagccgcaggtcggccttgtcggtgctgtccaccagtttctttctcaggtggtagatggtggggtacttctcgtggtaggccacctcgtccacgatgttgccgaagatggggtgccgctcgtgcttcttatcctcttccaccaggaaggactcttccagtctgtggaagaagctgtcgtccaccttggccatctcgttgctgaagatctcttgcagatagcagatccggttcttccgtctggtgtatcttcttctggcggttctcttcagccgggtggcctcggctgtttcgccgctgtcgaacagcagggctccgatcaggttcttcttgatgctgtgccggtcggtgttgcccagcaccttgaatttcttgctgggcaccttgtactcgtcggtgatcacggcccagcccacagagttggtgccgatgtccaggccgatgctgtacttcttgtcggctgctgggactccgtggataccgaccttccgcttcttctttggggccatcttatcgtcatcgtctttgtaatcaatatcatgatccttgtagtctccgtcgtggtccagtccttactgcagtagttttgctgaaatactcgattcacaaaaatatcaacttatggttgttttgtgagatatcaatatatggttgttttgtggttaagttgctgattataaataattattaaatatcactttatggttgcatcaacaggtaccgagctcgaattcactggccgtcgttttacaacgtcgtgactgggaaaaccctggcgttacccaacttaatcgccttgcagcacatccccctttcgccagctggcgtaatagcgaagaggcccgcaccgatcgcccttcccaacagttgcgcagcctgaatggcgaatggcgcctgatgcggtattttctccttacgcatctgtgcggtatttcacaccgcatatggtgcactctcagtacaatctgctctgatgccgcatagttaagccagccccgacacccgccaacacccgctgacgcgccctgacgggcttgtctgctcccggcatccgcttacagacaagctgtgaccgtctccgggagctgcatgtgtcagaggttttcaccgtcatcaccgaaacgcgcga

SEQ ID NO: 40 - DNA, 9980 bp, artificial sequence
  Synthetic
gacgaaagggcctcgtgatacgcctatttttataggttaatgtcatgataataatggtttcttagacgtcaggtggcacttttcggggaaatgtgcgcggaacccctatttgtttatttttctaaatacattcaaatatgtatccgctcatgagacaataaccctgataaatgcttcaataatattgaaaaaggaagagtatgagtattcaacatttccgtgtcgcccttattcccttttttgcggcattttgccttcctgtttttgctcacccagaaacgctggtgaaagtaaaagatgctgaagatcagttgggtgcacgagtgggttacatcgaactggatctcaacagcggtaagatccttgagagttttcgccccgaagaacgttttccaatgatgagcacttttaaagttctgctatgtggcgcggtattatcccgtattgacgccgggcaagagcaactcggtcgccgcatacactattctcagaatgacttggttgagtactcaccagtcacagaaaagcatcttacggatggcatgacagtaagagaattatgcagtgctgccataaccatgagtgataacactgcggccaacttacttctgacaacgatcggaggaccgaaggagctaaccgcttttttgcacaacatgggggatcatgtaactcgccttgatcgttgggaaccggagctgaatgaagccataccaaacgacgagcgtgacaccacgatgcctgtagcaatggcaacaacgttgcgcaaactattaactggcgaactacttactctagcttcccggcaacaattaatagactggatggaggcggataaagttgcaggaccacttctgcgctcggcccttccggctggctggtttattgctgataaatctggagccggtgagcgtggctctcgcggtatcattgcagcactggggccagatggtaagccctcccgtatcgtagttatctacacgacggggagtcaggcaactatggatgaacgaaatagacagatcgctgagataggtgcctcactgattaagcattggtaactgtcagaccaagtttactcatatatactttagattgatttaaaacttcatttttaatttaaaaggatctaggtgaagatcctttttgataatctcatgaccaaaatcccttaacgtgagttttcgttccactgagcgtcagaccccgtagaaaagatcaaaggatcttcttgagatcctttttttctgcgcgtaatctgctgcttgcaaacaaaaaaaccaccgctaccagcggtggtttgtttgccggatcaagagctaccaactctttttccgaaggtaactggcttcagcagagcgcagataccaaatactgttcttctagtgtagccgtagttaggccaccacttcaagaactctgtagcaccgcctacatacctcgctctgctaatcctgttaccagtggctgctgccagtggcgataagtcgtgtcttaccgggttggactcaagacgatagttaccggataaggcgcagcggtcgggctgaacggggggttcgtgcacacagcccagcttggagcgaacgacctacaccgaactgagatacctacagcgtgagctatgagaaagcgccacgcttcccgaagggagaaaggcggacaggtatccggtaagcggcagggtcggaacaggagagcgcacgagggagcttccagggggaaacgcctggtatctttatagtcctgtcgggtttcgccacctctgacttgagcgtcgatttttgtgatgctcgtcaggggggcggagcctatggaaaaacgccagcaacgcggcctttttacggttcctggccttttgctggccttttgctcacatgttctttcctgcgttatcccctgattctgtggataaccgtattaccgcctttgagtgagctgataccgctcgccgcagccgaactaccgagcgcagcgagtcagtgagcgaggaagcggaagagcgcccaatacgcaaaccgcctctccccgcgcgttggccgattcattaatgcagcccaagctttgttgatacaaccataaaatgataattacacccataaattgataattatcacacccataaattgatattgcctcttcatggtctaaacttcagtaagtttacgacattttcctcgaggtcatttccggggtacagctcgtccatgccgagagtgatcccggcggcggtcacgaactccagcaggaccatgtgatcgcgcttctcgttggggtctttgctcagggcggactgggtgctcaggtagtggttgtcgggcagcagcacggggccgtcgccgatgggggtgttctgctggtagtggtcggcgagctgcacgctgccgtcctcgatgttgtggcggatcttgaagttcaccttgatgccgttcttctgcttgtcggccatgatatagacgttgtggctgttgtagttgtactccagcttgtgccccaggatgttgccgtcctccttgaagtcgatgcccttcagctcgatgcggttcaccagggtgtcgccctcgaacttcacctcggcgcgggtcttgtagttgccgtcgtccttgaagaagatggtgcgctcctggacgtagccttcgggcatggcggacttgaagaagtcgtgctgcttcatgtggtcggggtagcggctgaagcactgcacgccgtaggtcagggtggtcacgagggtgggccagggcacgggcagcttgccggtggtgcagatgaacttcagggtcagcttgccgtaggtggcatcgccctcgccctcgccggacacgctgaacttgtggccgtttacgtcgccgtccagctcgaccaggatgggcaccaccccggtgaacagctcctcgcccttgctcactgggccaggattctcctcgacgtcaccgcatgttagcagacttcctctgccctctccactgccgaattcctttttcttttttgcctggccggcctttttcgtggccgccggccttttgtcgcctcccagctgagacaggtcgatccgtgtctcgtacaggccggtgatgctctggtggatcagggtggcgtccagcacctctttggtgctggtgtacctcttccggtcgatggtggtgtcaaagtacttgaaggcggcaggggctcccagattggtcagggtaaacaggtggatgatattctcggcctgctctctgatgggcttatcccggtgcttgttgtaggcggacagcactttgtccagattagcgtcggccaggatcactctcttggagaactcgctgatctgctcgatgatctcgtccaggtagtgcttgtgctgttccacaaacagctgtttctgctcattatcctcgggggagcccttcagcttctcatagtggctggccaggtacaggaagttcacatatttggagggcagggccagttcgtttcccttctgcagttcgccggcagaggccagcattctcttccggccgttttccagctcgaacagggagtacttaggcagcttgatgatcaggtcctttttcacttctttgtagcccttggcttccagaaagtcgatgggattcttctcgaagctgcttctttccatgatggtgatccccagcagctctttcacactcttcagtttcttggacttgcccttttccactttggccaccaccagcacagaataggccacggtggggctgtcgaagccgccgtacttcttagggtcccagtccttctttctggcgatcagcttatcgctgttcctcttgggcaggatagactctttgctgaagccgcctgtctgcacctcggtctttttcacgatattcacttggggcatgctcagcactttccgcacggtggcaaaatcccggcccttatcccacacgatctccccggtttcgccgtttgtctcgatcagaggccgcttccggatctcgccgttggccagggtaatctcggtcttgaaaaagttcatgatgttgctgtagaagaagtacttggcggtagccttgccgatttcctgctcgctcttggcgatcatcttccgcacgtcgtacaccttgtagtcgccgtacacgaactcgctttccagcttagggtactttttgatcagggcggttcccacgacggcgttcaggtaggcgtcgtgggcgtggtggtagttgttgatctcgcgcactttgtaaaactggaaatccttccggaaatcggacaccagcttggacttcagggtgatcactttcacttcccggatcagcttgtcattctcgtcgtacttagtgttcatccgggagtccaggatctgtgccacagccctcccacacataaccagagggcagcaattcacgaatcccaactgccgtcggctgtccatcactgtccttcactatggctttgatcccaggatgcagatcgagaagcacctgtcggcaccgtccgcaggggctcaagatgcccctgttctcatttccgatcgcgacgatacaagtcaggttgccagctgccgcagcagcagcagtgcccagcaccacgagttctgcacaaggtcccccagtaaaatgatatacattgacaccagtgaagatgcggccgtcgctagagagagctgcgctggcgacgctgtagtcttcagagatggggatgctgttgattgtagccgttgctctttcaatgagggtggattcttcttgagacaaaggcttggccatcggtccaggattctcttcgacatctccggcttgtttcagcagagagaagtttgttgcgccggatccggcatagtcggggacatcatatgggtatgcataatcaggcacgtcgtagggataagcgtaatctggaacatcgtatgggtatttcttcttcttagcctgtccagccttctttgtggcggcaggtcgcttggatcccttgtacagctcatccataccgagagtgatgcctgcggcagtcacaaattccagaaggaccatgtgatctctcttttcgtttgggtccttggaaagctttgattgcgtggagagataatgattgtcaggcaagagtacaggtccatctccgatgggcgtattttgttggtaatgatcagccagttgaacactaccatcttcgacattatgtcggatcttaaagttggcctttatcccatttttctgcttatcagcggtaatatacacattatggctgttaaagttgtactccaacttgtgccccagtatgttaccgtcctccttaaaatcaatacctttcagttcaattcgattaaccagagtgtccccttcaaatttaacctcggctcgggttttatatgtaccatcatccttaaagctgatggtcctttcttgaacataaccttcaggcattgcagacttgaaaaagtcatgctgtttcatgtggtcgggatatcgagaaaagcattgcacgccgtaggtgagggtcgttacgagtgtaggccatgggacgggcagtttgcccgtcgtacagatgaatttcagagtcagcttaccattcgtggcgtccccttcgccttcgcccctgacggagaatttatgtccatttacatctccatcaagctctaccagaatgggcactactccagtgaagagttcttcacctttactcacgctacctcctcctccgcttcctcctcctccgcttccacctcctccttccagggccttgtactcgaacatgactttcacgagttcgcacagttcctcgctgttccggtcggtcatcagtttctttttcttcagattcttcaggtgcacgatcttctctgattccagggtctggatttcgatcttcttgtcagcgccgatcttgaaggtggccacgaagccgtattctttcagaatgtccacgatggacttcatgatggcgttcttcagcttccggtcgtaggacagcagcttccgcaggttttccagcacttccagcaggctaatctcggcgtgggggatgtagttgaagtgggcaatgtagttccggatgtacaggtcctttttttcctgcttcagtttcttcactttcttgtcggagtagatgctccgcttttccacattgtccttgtacagttctttgtagaagttgatatacttttccacgatctggccgcttttgtacttcacattcttggagttgtcgaaattgaaaatttcctcgatgtagtggttctcgggaaactcgcccttcagccggaatctcaggtcccgctcccagatgctggtgtagcccacgagccggtgcaggatcttcagcagcaggccctgcagcaggttcagctcattgaattccaccttgttcttcaggtgggtgtacttctggatgttgccgatggccttctcatactctttgtagtcctcgtcgttgaacttttcgtccttcttgggtctggcgtacttccggtgcaggttctgctgcatggtgtagttcttttcaatctcattcttcttgttgctgtactctttcagttctttcaggctgatcttatacttggtgctttgtgatctgccgggtttccaccagctgtctcttgatgaagccggccttatccagttcgctcaggccgcctctctcggccttggtcagattgtcgaactttctctgggtaatcagcttggcgttcagcagctgccgccagtagttcttcatcttcttcacgacctcttcggagggcacgttgtcgctcttgccccggttcttgtcgcttctggtcagcaccttgttgtcgatggagtcgtccttcagaaagctctgaggcacgatatggtccacatcgtagtcggacagccggttgatgtccagttcctggtccacgtacatatcccgcccattctgcaggtagtacaggtacagcttctcgttctgcagctgggtgttttccacggggtgttctttcaggatctggctgcccagctctttgatgccctcttcgatccgcttcattctctcgcggctgttcttctgtcccttctgggtggtctggttctctctggccatttcgatcacgatgttctcgggcttgtgccggcccatcactttcacgagctcgtccaccaccttcactgtctgcaggatgcccttcttaatggcggggctgccggccagattggcaatgtgctcgtgcaggctatcgccctggccggacacctgggctttctggatgtcctctttaaaggtcaggctgtcgtcgtggatcagctgcatgaagtttctgttggcgaagccgtcggacttcaggaaatccaggattgtcttgccggactgcttgtcccggatgccgttgatcagcttccggctcagcctgccccagccggtgtatctccgccgcttcagctgcttcatcactttgtcgtcgaacaggtgggcataggttttcagccgttcctcgatcatctctctgtcctcaaacagtgtcagggtcagcacgatatcttccagaatgtcctcgttttcctcattgtccaggaagtccttgtccttgataattttcagcagatcgtggtatgtgcccagggaggcgttgaaccgatcttccacgccggagatttccacggagtcgaagcactcgattttcttgaagtagtcctctttcagctgcttcacggtcactttccggttggtcttgaacagcaggtccacgatggcctttttctgctcgccgctcaggaaggcgggctttctcattccctcggtcacgtatttcactttggtcagctcgttatacacggtgaagtactcgtacagcaggctgtgcttgggcagcaccttctcgttgggcaggttcttatcgaagttggtcatccgctcgatgaagctctgggcggaagcgcccttgtccaccacttcctcgaagttccagggggtgatggtttcctcgctctttctggtcatccaggcgaatctgctgtttcccctggccagagggcccacgtagtaggggatgcggaaggtcaggatcttctcgatcttttcccggttgtccttcaggaatgggtaaaaatcttcctgccgccgcagaatggcgtgcagctctcccaggtggatctggtgggggatgctgccgttgtcgaaggtccgctgcttccgcagcaggtcctctctgttcagcttcacgagcagttcctcggtgccgtccatcttttccaggatgggcttgatgaacttgtagaactcttcctggctggctccgccgtcaatgtagccggcgtagccgttcttgctctggtcgaagaaaatctctttgtacttctcaggcagctgctgccgcacgagagctttcagcagggtcaggtcctggtggtgctcgtcgtatctcttgatcatagaggcgctcaggggggccttggtgatctcggtgttcactctcaggatgtcgctcagcaggatggcgtcggacaggttcttggcggccagaaacaggtcggcgtactggtcgccgatctgggccagcaggttgtccaggtcgtcgtcgtaggtgtccttgctcagctgcagtttggcatcctcggccaggtcgaagttgctcttgaagttgggggtcaggcccaggctcagggcaatcaggtttccgaacaggccattcttcttctcgccgggcagctgggcgatcagattttccagccgtctgctcttgctcagtctggcagacaggatggccttggcgtccacgccgctggcgttgatggggttttcctcgaacagctggttgtaggtctgcaccagctggatgaacagcttgtccacgtcgctgttgtcggggttcaggtcgccctcgatcaggaagtggccccggaacttgatcatgtgggccagggccagatagatcagccgcaggtcggccttgtcggtgctgtccaccagtttctttctcaggtggtagatggtggggtacttctcgtggtaggccacctcgtccacgatgttgccgaagatggggtgccgctcgtgcttcttatcctcttccaccaggaaggactcttccagtctgtggaagaagctgtcgtccaccttggccatctcgttgctgaagatctcttgcagatagcagatccggttcttccgtctggtgtatcttcttctggcggttctcttcagccgggtggcctcggctgtttcgccgctgtcgaacagcagggctccgatcaggttcttcttgatgctgtgccggtcggtgttgcccagcaccttgaatttcttgctgggcaccttgtactcgtcggtgatcacggcccagcccacagagttggtgccgatgtccaggccgatgctgtacttcttgtcggctgctgggactccgtggataccgaccttccgcttcttctttggggccatcttatcgtcatcgtctttgtaatcaatatcatgatccttgtagtctccgtcgtggtccagtccttactgcagtagttttgctgaaatactcgattcacaaaaatatcaacttatggttgttttgtgagatatcaatatatggttgttttgtggttaagttgctgattataaataattattaaatatcactttatggttgcatcaacaggtaccgagctcgaattcactggccgtcgttttacaacgtcgtgactgggaaaaccctggcgttacccaacttaatcgccttgcagcacatccccctttcgccagctggcgtaatagcgaagaggcccgcaccgatcgcccttcccaacagttgcgcagcctgaatggcgaatggcgcctgatgcggtattttctccttacgcatctgtgcggtatttcacaccgcatatggtgcactctcagtacaatctgctctgatgccgcatagttaagccagccccgacacccgccaacacccgctgacgcgccctgacgggcttgtctgctcccggcatccgcttacagacaagctgtgaccgtctccgggagctgcatgtgtcagaggttttcaccgtcatcaccgaaacgcgcga

SEQ ID NO: 41 - DNA, 12612 bp, artificial sequence
  Synthetic
gacgaaagggcctcgtgatacgcctatttttataggttaatgtcatgataataatggtttcttagacgtcaggtggcacttttcggggaaatgtgcgcggaacccctatttgtttatttttctaaatacattcaaatatgtatccgctcatgagacaataaccctgataaatgcttcaataatattgaaaaaggaagagtatgagtattcaacatttccgtgtcgcccttattcccttttttgcggcattttgccttcctgtttttgctcacccagaaacgctggtgaaagtaaaagatgctgaagatcagttgggtgcacgagtgggttacatcgaactggatctcaacagcggtaagatccttgagagttttcgccccgaagaacgttttccaatgatgagcacttttaaagttctgctatgtggcgcggtattatcccgtattgacgccgggcaagagcaactcggtcgccgcatacactattctcagaatgacttggttgagtactcaccagtcacagaaaagcatcttacggatggcatgacagtaagagaattatgcagtgctgccataaccatgagtgataacactgcggccaacttacttctgacaacgatcggaggaccgaaggagctaaccgcttttttgcacaacatgggggatcatgtaactcgccttgatcgttgggaaccggagctgaatgaagccataccaaacgacgagcgtgacaccacgatgcctgtagcaatggcaacaacgttgcgcaaactattaactggcgaactacttactctagcttcccggcaacaattaatagactggatggaggcggataaagttgcaggaccacttctgcgctcggcccttccggctggctggtttattgctgataaatctggagccggtgagcgtggctctcgcggtatcattgcagcactggggccagatggtaagccctcccgtatcgtagttatctacacgacggggagtcaggcaactatggatgaacgaaatagacagatcgctgagataggtgcctcactgattaagcattggtaactgtcagaccaagtttactcatatatactttagattgatttaaaacttcatttttaatttaaaaggatctaggtgaagatcctttttgataatctcatgaccaaaatcccttaacgtgagttttcgttccactgagcgtcagaccccgtagaaaagatcaaaggatcttcttgagatcctttttttctgcgcgtaatctgctgcttgcaaacaaaaaaaccaccgctaccagcggtggtttgtttgccggatcaagagctaccaactctttttccgaaggtaactggcttcagcagagcgcagataccaaatactgttcttctagtgtagccgtagttaggccaccacttcaagaactctgtagcaccgcctacatacctcgctctgctaatcctgttaccagtggctgctgccagtggcgataagtcgtgtcttaccgggttggactcaagacgatagttaccggataaggcgcagcggtcgggctgaacggggggttcgtgcacacagcccagcttggagcgaacgacctacaccgaactgagatacctacagcgtgagctatgagaaagcgccacgcttcccgaagggagaaaggcggacaggtatccggtaagcggcagggtcggaacaggagagcgcacgagggagcttccagggggaaacgcctggtatctttatagtcctgtcgggtttcgccacctctgacttgagcgtcgatttttgtgatgctcgtcaggggggcggagcctatggaaaaacgccagcaacgcggcctttttacggttcctggccttttgctggccttttgctcacatgttctttcctgcgttatcccctgattctgtggataaccgtattaccgcctttgagtgagctgataccgctcgccgcagccgaactaccgagcgcagcgagtcagtgagcgaggaagcggaagagcgcccaatacgcaaaccgcctctccccgcgcgttggccgattcattaatgcagcccaagctttgttgatacaaccataaaatgataattacacccataaattgataattatcacacccataaattgatattgcctcttcatggtctaaacttcagtaagtttacgacattttcctcgaggtcatttccggggtacagctcgtccatgccgagagtgatcccggcggcggtcacgaactccagcaggaccatgtgatcgcgcttctcgttggggtctttgctcagggcggactgggtgctcaggtagtggttgtcgggcagcagcacggggccgtcgccgatgggggtgttctgctggtagtggtcggcgagctgcacgctgccgtcctcgatgttgtggcggatcttgaagttcaccttgatgccgttcttctgcttgtcggccatgatatagacgttgtggctgttgtagttgtactccagcttgtgccccaggatgttgccgtcctccttgaagtcgatgcccttcagctcgatgcggttcaccagggtgtcgccctcgaacttcacctcggcgcgggtcttgtagttgccgtcgtccttgaagaagatggtgcgctcctggacgtagccttcgggcatggcggacttgaagaagtcgtgctgcttcatgtggtcggggtagcggctgaagcactgcacgccgtaggtcagggtggtcacgagggtgggccagggcacgggcagcttgccggtggtgcagatgaacttcagggtcagcttgccgtaggtggcatcgccctcgccctcgccggacacgctgaacttgtggccgtttacgtcgccgtccagctcgaccaggatgggcaccaccccggtgaacagctcctcgcccttgctcactgggccaggattctcctcgacgtcaccgcatgttagcagacttcctctgccctctccactgccgaattcctttttcttttttgcctggccggcctttttcgtggccgccggccttttgtcgcctcccagctgagacaggtcgatccgtgtctcgtacaggccggtgatgctctggtggatcagggtggcgtccagcacctctttggtgctggtgtacctcttccggtcgatggtggtgtcaaagtacttgaaggcggcaggggctcccagattggtcagggtaaacaggtggatgatattctcggcctgctctctgatgggcttatcccggtgcttgttgtaggcggacagcactttgtccagattagcgtcggccaggatcactctcttggagaactcgctgatctgctcgatgatctcgtccaggtagtgcttgtgctgttccacaaacagctgtttctgctcattatcctcgggggagcccttcagcttctcatagtggctggccaggtacaggaagttcacatatttggagggcagggccagttcgtttcccttctgcagttcgccggcagaggccagcattctcttccggccgttttccagctcgaacagggagtacttaggcagcttgatgatcaggtcctttttcacttctttgtagcccttggcttccagaaagtcgatgggattcttctcgaagctgcttctttccatgatggtgatccccagcagctctttcacactcttcagtttcttggacttgcccttttccactttggccaccaccagcacagaataggccacggtggggctgtcgaagccgccgtacttcttagggtcccagtccttctttctggcgatcagcttatcgctgttcctcttgggcaggatagactctttgctgaagccgcctgtctgcacctcggtctttttcacgatattcacttggggcatgctcagcactttccgcacggtggcaaaatcccggcccttatcccacacgatctccccggtttcgccgtttgtctcgatcagaggccgcttccggatctcgccgttggccagggtaatctcggtcttgaaaaagttcatgatgttgctgtagaagaagtacttggcggtagccttgccgatttcctgctcgctcttggcgatcatcttccgcacgtcgtacaccttgtagtcgccgtacacgaactcgctttccagcttagggtactttttgatcagggcggttcccacgacggcgttcaggtaggcgtcgtgggcgtggtggtagttgttgatctcgcgcactttgtaaaactggaaatccttccggaaatcggacaccagcttggacttcagggtgatcactttcacttcccggatcagcttgtcattctcgtcgtacttagtgttcatccgggagtccaggatctgtgccacagccctcccacacataaccagagggcagcaattcacgaatcccaactgccgtcggctgtccatcactgtccttcactatggctttgatcccaggatgcagatcgagaagcacctgtcggcaccgtccgcaggggctcaagatgcccctgttctcatttccgatcgcgacgatacaagtcaggttgccagctgccgcagcagcagcagtgcccagcaccacgagttctgcacaaggtcccccagtaaaatgatatacattgacaccagtgaagatgcggccgtcgctagagagagctgcgctggcgacgctgtagtcttcagagatggggatgctgttgattgtagccgttgctctttcaatgagggtggattcttcttgagacaaaggcttggccatcggtccaggattctcttcgacatctccggcttgtttcagcagagagaagtttgttgcgccggatccggcatagtcggggacatcatatgggtatgcataatcaggcacgtcgtagggataagcgtaatctggaacatcgtatgggtatttcttcttcttagcctgtccagccttctttgtggcggcaggtcgcttggatcccttgtacagctcatccataccgagagtgatgcctgcggcagtcacaaattccagaaggaccatgtgatctctcttttcgtttgggtccttggaaagctttgattgcgtggagagataatgattgtcaggcaagagtacaggtccatctccgatgggcgtattttgttggtaatgatcagccagttgaacactaccatcttcgacattatgtcggatcttaaagttggcctttatcccatttttctgcttatcagcggtaatatacacattatggctgttaaagttgtactccaacttgtgccccagtatgttaccgtcctccttaaaatcaatacctttcagttcaattcgattaaccagagtgtccccttcaaatttaacctcggctcgggttttatatgtaccatcatccttaaagctgatggtcctttcttgaacataaccttcaggcattgcagacttgaaaaagtcatgctgtttcatgtggtcgggatatcgagaaaagcattgcacgccgtaggtgagggtcgttacgagtgtaggccatgggacgggcagtttgcccgtcgtacagatgaatttcagagtcagcttaccattcgtggcgtccccttcgccttcgcccctgacggagaatttatgtccatttacatctccatcaagctctaccagaatgggcactactccagtgaagagttcttcacctttactcacgctacctcctcctccgcttcctcctcctccgcttccacctcctccttccagggccttgtactcgaacatgactttcacgagttcgcacagttcctcgctgttccggtcggtcatcagtttctttttcttcagattcttcaggtgcacgatcttctctgattccagggtctggatttcgatcttcttgtcagcgccgatcttgaaggtggccacgaagccgtattctttcagaatgtccacgatggacttcatgatggcgttcttcagcttccggtcgtaggacagcagcttccgcaggttttccagcacttccagcaggctaatctcggcgtgggggatgtagttgaagtgggcaatgtagttccggatgtacaggtcctttttttcctgcttcagtttcttcactttcttgtcggagtagatgctccgcttttccacattgtccttgtacagttctttgtagaagttgatatacttttccacgatctggccgcttttgtacttcacattcttggagttgtcgaaattgaaaatttcctcgatgtagtggttctcgggaaactcgcccttcagccggaatctcaggtcccgctcccagatgctggtgtagcccacgagccggtgcaggatcttcagcagcaggccctgcagcaggttcagctcattgaattccaccttgttcttcaggtgggtgtacttctggatgttgccgatggccttctcatactctttgtagtcctcgtcgttgaacttttcgtccttcttgggtctggcgtacttccggtgcaggttctgctgcatggtgtagttcttttcaatctcattcttcttgttgctgtactctttcagttctttcaggctgatcttatacttggccttatcggcgatcttttccagcagattcagcatgccgtatttcttgatattgtagaaggcccggtgcttgatgatgttctcgccgtcgaaatagatcttgttggtgtcgaactttttcagctctttccggtccttgattttgttttcgttgaagtccaggaacttgccgatctcgttggcttccagctcgaagtcctcggtcactctgttgttgtccaggttcagcaggttgatcagttccaactcgtcgctgaaggtttcttctttgttggcggactggtacttttccaggctgcccttcaggttggtcagctctttgtggttcagcagcttcaggatcaggtaaaacatgttcagattctcggtgtacttcagaatcttccccagcttgatctcgcgcacgaactcattgatctcgtgagggatttctttgttccgattgtgcttctcatagttcttcaggatcttgtcgtacttctctttgttatcctttttgatcttgatcttggagaagatgtcgttgttgtcattgttgttgttgctctcgatatacttcagattgttcttgttcaggtagtcgatgaagcccttcaggaaaatctgctgaataaagtcgatgtaggtattcttttcctctttgtcctggttgttgatcatctctctgctctggatgatggccaggtattccacgggcacggttttctcgatgttctcgaacttctgatacttgtagtggccggttttctggttccgctgcttgttaatcttgatcacttcattggtgatcttaaagaacaccttggagtttttcacgaacttgttcaggaactcgccgtagtagatattcttcagcaggtagatctgggcgtccttctcttctttgtccttgggcacgctccaaaaaaacttcagggtattccgcaggtcctcaatcttgttgtacagcttggtgaagctgggcacgaaggggatgtttttgttcacgaagttgaacttggtattcttcaggtacttgatgatcacatccttctcgtagtagttgaacacgttggcgctgttcagctgcttgaagattttcagcttcagcttcttttcgttgatttcgttctgaaacatcttcttggagatctcgctgggggcgatattcttgaaggcgaagatgtccttgccttccagttccaggttgaagtgcacgatgccgtgtctgatgctgctgatggcctcgtcgatgttggcgaagaagtcctcgatctcgttcttgttgtccatgttgaagtcgtagctgtagaacatcttcagattttctttcacttcgttctgcttgttctcattgtagatcttgtccacctcgccggacacgtatttctcttcgcccttgttgttcttcacggtcttgccccgcatccggccggtgataccgttctcgttctcggtttccaggatgttcctcaggctgaagtaggccacgctggacacgccgatgatgtttctcaggaaggcctcgttctgccggttccgggcgataaagtcggaggtggcgatctcgcccacttgcagatagtagttgtacttgccgcagttccgcacgtaggtgtccagcttgttcagcagtttgttttcgatcagctttttcagattctggtactcgaagatccgcttgatcttatcgttgctgatgttgctcagccgcttgtacacgtagtttttcagcagctgggacatctcgatttccacgaagtggcagaaggcgtacttaatattcttgtcgttcagttcctctttgtccaggtagtacttgtagaacacctggcttttcttcagctcagacatgtcggggatcttctcaatcagctctttgatgttgttcacgttctggatctcttcgtagataatcttggcgaagttctctttgtcgttcttccggccgatgatcttgtgatagtactcgcggatcttgtacttctcgtgcttcttgctgttctcgatcaggaaaaacagtttctcgatatcctctttcttatacagcttgtcgaaggcttcctgcacgttgttgatgtagtcgttgcgcttggcgctctctctgtagtagtcgtagatgatgttccgcttgctcttgccgcccactttttccacgttgttctcgttgatcttctggtagttggccttgttctcttcgaagctgtacttcaggctgttgatcttgttcagcttggcttccacgtccttccgaaagatttccagttcctcagagttcacgtcctcgttcagcaggatcttcttcagcacggagaagctgttcttgtttttcaggtcgtactcgctgatgtcctcttcgctatagttcttgtcctgcacggcgttcttttctttccggttcttcagatacagcacgctgtccttcaggtgcagcaccttgttgctaaagaacttcttcaggttctctcttctgatccggttctcttcctcggaggcgttgtcggggttcttgatgtagatgtccagccggatgctcagcagctcgctcagtctctcgctggtccggttttcctcgctggtggacttcacgagcttgccctcttcgatgtacttcttgtggctgatgccgtcgaccttggtcactttcatggatcgtgctttgtgatctgccgggtttccaccagctgtctcttgatgaagccggccttatccagttcgctcaggccgcctctctcggccttggtcagattgtcgaactttctctgggtaatcagcttggcgttcagcagctgccgccagtagttcttcatcttcttcacgacctcttcggagggcacgttgtcgctcttgccccggttcttgtcgcttctggtcagcaccttgttgtcgatggagtcgtccttcagaaagctctgaggcacgatatggtccacatcgtagtcggacagccggttgatgtccagttcctggtccacgtacatatcccgcccattctgcaggtagtacaggtacagcttctcgttctgcagctgggtgttttccacggggtgttctttcaggatctggctgcccagctctttgatgccctcttcgatccgcttcattctctcgcggctgttcttctgtcccttctgggtggtctggttctctctggccatttcgatcacgatgttctcgggcttgtgccggcccatcactttcacgagctcgtccaccaccttcactgtctgcaggatgcccttcttaatggcggggctgccggccagattggcaatgtgctcgtgcaggctatcgccctggccggacacctgggctttctggatgtcctctttaaaggtcaggctgtcgtcgtggatcagctgcatgaagtttctgttggcgaagccgtcggacttcaggaaatccaggattgtcttgccggactgcttgtcccggatgccgttgatcagcttccggctcagcctgccccagccggtgtatctccgccgcttcagctgcttcatcactttgtcgtcgaacaggtgggcataggttttcagccgttcctcgatcatctctctgtcctcaaacagtgtcagggtcagcacgatatcttccagaatgtcctcgttttcctcattgtccaggaagtccttgtccttgataattttcagcagatcgtggtatgtgcccagggaggcgttgaaccgatcttccacgccggagatttccacggagtcgaagcactcgattttcttgaagtagtcctctttcagctgcttcacggtcactttccggttggtcttgaacagcaggtccacgatggcctttttctgctcgccgctcaggaaggcgggctttctcattccctcggtcacgtatttcactttggtcagctcgttatacacggtgaagtactcgtacagcaggctgtgcttgggcagcaccttctcgttgggcaggttcttatcgaagttggtcatccgctcgatgaagctctgggcggaagcgcccttgtccaccacttcctcgaagttccagggggtgatggtttcctcgctctttctggtcatccaggcgaatctgctgtttcccctggccagagggcccacgtagtaggggatgcggaaggtcaggatcttctcgatcttttcccggttgtccttcaggaatgggtaaaaatcttcctgccgccgcagaatggcgtgcagctctcccaggtggatctggtgggggatgctgccgttgtcgaaggtccgctgcttccgcagcaggtcctctctgttcagcttcacgagcagttcctcggtgccgtccatcttttccaggatgggcttgatgaacttgtagaactcttcctggctggctccgccgtcaatgtagccggcgtagccgttcttgctctggtcgaagaaaatctctttgtacttctcaggcagctgctgccgcacgagagctttcagcagggtcaggtcctggtggtgctcgtcgtatctcttgatcatagaggcgctcaggggggccttggtgatctcggtgttcactctcaggatgtcgctcagcaggatggcgtcggacaggttcttggcggccagaaacaggtcggcgtactggtcgccgatctgggccagcaggttgtccaggtcgtcgtcgtaggtgtccttgctcagctgcagtttggcatcctcggccaggtcgaagttgctcttgaagttgggggtcaggcccaggctcagggcaatcaggtttccgaacaggccattcttcttctcgccgggcagctgggcgatcagattttccagccgtctgctcttgctcagtctggcagacaggatggccttggcgtccacgccgctggcgttgatggggttttcctcgaacagctggttgtaggtctgcaccagctggatgaacagcttgtccacgtcgctgttgtcggggttcaggtcgccctcgatcaggaagtggccccggaacttgatcatgtgggccagggccagatagatcagccgcaggtcggccttgtcggtgctgtccaccagtttctttctcaggtggtagatggtggggtacttctcgtggtaggccacctcgtccacgatgttgccgaagatggggtgccgctcgtgcttcttatcctcttccaccaggaaggactcttccagtctgtggaagaagctgtcgtccaccttggccatctcgttgctgaagatctcttgcagatagcagatccggttcttccgtctggtgtatcttcttctggcggttctcttcagccgggtggcctcggctgtttcgccgctgtcgaacagcagggctccgatcaggttcttcttgatgctgtgccggtcggtgttgcccagcaccttgaatttcttgctgggcaccttgtactcgtcggtgatcacggcccagcccacagagttggtgccgatgtccaggccgatgctgtacttcttgtcggctgctgggactccgtggataccgaccttccgcttcttctttggggccatcttatcgtcatcgtctttgtaatcaatatcatgatccttgtagtctccgtcgtggtccagtccttactgcagtagttttgctgaaatactcgattcacaaaaatatcaacttatggttgttttgtgagatatcaatatatggttgttttgtggttaagttgctgattataaataattattaaatatcactttatggttgcatcaacaggtaccgagctcgaattcactggccgtcgttttacaacgtcgtgactgggaaaaccctggcgttacccaacttaatcgccttgcagcacatccccctttcgccagctggcgtaatagcgaagaggcccgcaccgatcgcccttcccaacagttgcgcagcctgaatggcgaatggcgcctgatgcggtattttctccttacgcatctgtgcggtatttcacaccgcatatggtgcactctcagtacaatctgctctgatgccgcatagttaagccagccccgacacccgccaacacccgctgacgcgccctgacgggcttgtctgctcccggcatccgcttacagacaagctgtgaccgtctccgggagctgcatgtgtcagaggttttcaccgtcatcaccgaaacgcgcga

SEQ ID NO: 42 - DNA, 12828 bp, artificial sequence
  Synthetic
aacgtggctggcctggttcaccacgcgggaaacggtctgataagagacaccggcatactctgcgacatcgtataacgttactggtttcacattcaccaccctgaattgactctcttccgggcgctatcatgccataccgcgaaaggttttgcgccattcgatggtgtccgggatctcgacgctctcccttatgcgactcctgcattaggaatggataaccgtattaccgcctttgagtgagctgataccgctcgccgcagccgaacgaccgagcgcagcgagtcagtgagcgaggacacaagctttgacagctagctcagtcctaggtataatactagcgtcgacgtggagatataccatgggtgaactgccgagtaggtagctgataacgagaatattgtggcaaaagcgcataaggtgctgtgaactgccgagtaggtagctgataacggatccgaattcgagcgaaggagatatacatatgtttttgcaaagacctaaaccttacagcgatgaaagtttagaaagtttctttatccgagtggctaacaaaaatggctacggtgatgtccatcgcttcctagaagccactaaacgattccttcaagacattgaccataatggctatcaaacctttccgactgatataactcggataaacccatactcagctaaaaacagttccagcgcacgaactgcgtcattcctgaaacttgcacaattgacatttaatgaaccgccagagctacttgggttggcaattaacagaacaaacatgaaatactcgccgtcaactagcgcggttgttagaggtgcagaagtctttcctcgcagtttactacggacgcactccatcccctgctgtcctttgtgtctgcgagaaaatggctacgcctcctacctttggcactttcaggggtacgaatactgccacagccataacgtacctttaattaccacttgtagctgtggtaaggagtttgactaccgagtatctgggttaaagggcatttgctgcaaatgcaaggagcctatcaccttaaccagcagggagaacggtcatgaggcagcgtgtactgtttcaaactggcttgctggccatgaatctaaacctctgccaaatcttcctaaaagctaccgatggggtttagttcattggtggatgggtattaaagatagcgagttcgatcacttttcgttcgttcaatttttctcaaactggccaaggtcattccactcgataatcgaagatgaagtagagttcaaccttgagcatgctgttgtcagcacgtctgaattacgactaaaagatcttcttggtcgattgtttttcggttcaattcggttacctgagcggaatcttcaacacaatatcatccttggtgagcttctctgctatttagaaaatcgtttatggcaagacaagggattaatcgccaacctcaaaatgaacgcgttagaggcgactgtaatgttaaattgtagcctcgatcagattgcatcaatggttgaacaacgcatcttgaagccaaatcgaaaaagcaagcccaacagccctcttgatgttaccgattatctatttcatttcggcgatattttctgtctttggttagctgagttccaaagcgatgagtttaaccgttcgttttatgtgtcgaggtggtaaatgcaaactctgaaagaactaatcgcatccaatcctgacgacttaacaactgaacttaagagagcatttcgtccactcacaccgcatattgcaattgatggtaatgaacttgacgcactgacgatattagtcaatttaaccgataagactgatgatcagaaagacctgctcgatcgagccaaatgcaagcaaaaacttcgagatgaaaaatggtgggctagctgcataaattgcgttaattacagacaaagccataacccaaaattcccggatatacgttctgaaggcgtgattcgaacccaagccctgggtgaattaccgagtttcctactctcgtcctcaaaaatcccaccataccattggtcatatagccatgattcaaaatacgtcaacaaaagcgcattcctcaccaatgagttttgttgggatggtgagatctcatgtttgggtgagcttcttaaagatgcagatcacccactttggaatactttgaaaaagttaggttgttctcaaaaaacttgcaaagcaatggcaaaacaactagctgatattactctcacgactatcaatgtcacactcgcaccaaattacctgactcaaatatctctccccgatagtgatacatcctacatttcactctctcctgttgcatcgctatcgatgcaaagccactttcatcagaggctccaagatgaaaatcggcatagcgcgataacgcggtttagccgaactaccaacatgggggtcactgcgatgacatgtggcggcgcatttagaatgttaaagtctggcgctaagttttccagcccccctcatcaccgattaaacagtaaacgaagttggttgacgtcagagcatgttcagtcattaaaacagtaccagcgcctcaacaaaagcctcatacctgaaaactctcggattgcactccgtagaaaatacaaaatcgagcttcaaaatatggtcagatcttggtttgcaatgcaagaccatacccttgattcgaacatacttatccaacatttgaatcatgacctatcttacttaggagccacaaaacgttttgcatacgatccagcgatgaccaagctctttactgagcttttgaaacgagagttatcaaattcaatcaataatggtgagcaacacactaatggatcgtttttagtcctaccgaatatcagggtttgtggcgcaacagctttaagctccccggtaacggtggggattccatcacttacagctttctttggcttcgttcacgcatttgaacggaatataaatcgcaccacctcatcgtttcgtgttgaatcctttgcgatatgcgtccatcaactacatgtcgagaagcgaggtttgacagcagagtttgtggaaaaaggcgacgggactatatccgctcccgcgacccgggatgactggcagtgtgatgtcgtatttagccttattttgaacaccaactttgctcaacatattgaccaagatacgttagttacatcactaccaaagcgattggctcggggttcagcaaaaattgcgattgatgactttaaacatatcaactcattctcgacattagaaacagcgatcgaatctctgccaatagaagctggtaggtggttatcactttacgcacagtcaaacaataatctaagtgatctattagcagccatgacagaggaccatcagctcatggcaagctgcgtcggttaccacttgttagaagagcccaaagataaaccaaactccctcagaggttacaaacacgctatcgccgagtgcatcattggactcattaactcaatcacctttagctcagagactgatcccaacacaatcttttggtcgctaaagaactatcaaaactacctagtggtacagccaaggagtatcaacgatgaaactaccgacaaatctagcctatgagcgctctatcgacccatcagatgtctgtttttttgtcgtctggcccgatgatagaaaaacacctttaacctacaattctcgtactctgctcgggcaaatggaagcggcatcattagcctatgatgtctcaggtcaaccaataaaaagtgccaccgctgaggcgttagctcaagggaaccctcatcaagttgatttctgccacgttccatacggtgcgagtcatattgaatgcagtttctccgtctcgttttcttctgaactacgtcaaccatataagtgtaactcaagcaaagttaaacaaacgctagtgcaattagtcgagctctacgaaacgaaaatcggctggactgagctagcaacccgatatttgatgaacatttgcaacggtaaatggctgtggaaaaatacccgtaaagcctattgctggaacattgtacttacaccttggccttggaacggggaaaaggttggatttgaagatattcgtactaactacacctcacggcaagactttaaaaataataaaaattggtctgctatagttgaaatgatcaaaaccgcattttctagtactgatgggctggcgatatttgaagtcagggccaccttgcacttgccaacgaatgctatggtgcggccaagccaagttttcacagaaaaagaaagtggcagtaaaagtaaatctaaaactcaaaacagtcgagtttttcagagtacaactattgatggtgaacgatcgccaatactaggggcctttaaaacgggagcagctattgcaaccattgacgactggtatcctgaagccactgagccactaagggtcggacggtttggggttcatcgcgaagatgtcacttgctaccgtcatccgtctaccggaaaagattttttctcgatattacaacaagcagagcactatattgaagtgttgagcgccaacaaaactcccgctcaagaaactatcaacgacatgcactttttaatggctaacctgattaagggtgggatgttccagcataaaggagactgactgtgaaatggtattataagacaatcacctttctgccagagttgtgcaacaacgagtcactggctgcaaagtgtctccgcgttctgcatggatttaactatcagtatgagacacgaaatatcggcgtttcatttccgctttggtgtgatgcaacggttggaaaaaagatttcatttgtcagcaagaacaagatagaactcgacttactacttaaacaacactatttcgtccaaatggaacaacttcaatactttcatatatccaacactgttctcgtcccagaagattgtacatacgtttcctttagacgctgtcaatctatagataagctcacagcagcagggctggcaaggaaaatcagacgcctggagaaacgtgctctatctagaggcgagcaatttgacccatcatcttttgctcaaaaagagcatactgcaatagcgcactaccactcacttggggagtccagcaaacagacgaaccgcaactttcgactcaatatcaggatgctctcggagcaaccccgtgaggggaactcgatttttagtagctatggcttatcaaattcagaaaactcgtttcagcctgtacccttaatctgacctttaataaggagatataccatggcgacaagtttacctacgccctcagcaattacgacttcggcgttagagtatgcattccatactcccgctcgcaatctaacgaaatctcgcggaaaaaacattcatcgttatgtcagtgtaaagatgagtaagaggattacggtagaatctactctagagtgtgatgcctgctatcactttgattttgagccaagtattgttcgcttttgcgctcaaccgattcgatttttatattatctcaatggtcagtctcactcctatgttcctgactttctagttcaatttgataccaacgagtttgttctatatgaagtaaagtcagcttatgctaagaacaaacctgattttgatgttgaatgggaggcgaaagtaaaagcagcaactgaactagggctagaattggagcttgttgaagagagtgatattagggatacggttgtattaaataatcttaagcgcatgcatcgttatgcttcgaaagatgagctgaataacgtacataactctctcttaaaaataataaagtacaatggcgcccaatctgcaagatgcttgggagaacagttgggtttaaaaggccgaactgttttaccaattttgtgcgatttgctgtcaaggtgtttactcgatacacgtttggataagcctctatctcttgaatctcgatttgagttggccagttatggctaagaaagggttctcaagtttccatagaaaagcagtctcttcccaagatacgcttgaatcgatagagcttgtctctagcgctaattgtctagaaagtgttacgtatcaagatatatcagcatttcccgaaacaattgcggtagagattaatttccgattaagcattcttcgctttttagcgcgaaagtgcgaaaccattgtggccaaatcaattgaaccacatcgtgtagagctacagcaaaactatagtagaaaaatacccagtgcaataacgatatatcgatggtggcttgcttttcgaaaatcagactacaaccccattagcttagcacctaatatcaaggatagaggtaatagagagacaaaagtgtcaacagttgttgattctattatggaacaggcagttgaaagagttatatctggacgaaaagtcaatgttagctctgcatataaacgtgttcgacgaaaagttcgtcaatacaatctaactcatggaacgaaatacacgtatcctaagtacgaatctgtaagaaagcgagtaaaaaagaaaaccccatttgagttattagccgcagggaaaggggagagagtagctaagagagagtttcgccgaatgggaaaaaagatcctcacgtctagcgtgctagagagggttgaaatagatcacactgtcgttgacctttttgcagtacacgaagagtatcgaatcccattgggccgaccttggcttactcaattggttgattgttacagtaaagctgtaatcggtttttatttaggtttcgagcctcctagctatgtgtcggtttcccttgcacttaagaatgcaatacaacgcaaagatgacttaatctcctcgtatgaatcgatcgagaatgaatggctatgttatggcatcccagacctactcgtaactgataatggtaaagagtttttgtcgaaagcatttgatcaagcatgtgaatcactattgatcaatgtgcatcaaaataaagttgagacgcccgacaacaaacctcatgttgaacgtaactacgggactattaatacttctctgttagacgatttacctgggaaatccttcagccagtaccttcaaagagaagggtacgactctgtgggagaagctacccttacactcaatgagattagagaaatttacttaatttggttggtggatatttatcataaaaaacccaatcagagaggcactaattgtcctaatgttgcgtggaaaaagggttgtcaagaatgggaaccagaggagttctctggttctaaagacgaattagactttaaatttgctattgttgattacaaacaacttactaaagtagggataactgtctacaaagaactgagttatagcaatgaccgtttagctgaatatagagggaagaaaggaaaccataaagttcagttcaagtataaccctgagtgtatggcagttatttgggtgttggatgaggatatgaatgagtactttacagttaatgcgattgactacgaatatgcaagtagagtatcactttggcaacataaatataacatgaaatatcaagcagaactaaattcagcagaatatgatgaggacaaggaaattgatgcagaaataaaaattgaagaaatcgcagatcgttcaattgttaagactaacaaaatcagagctcggaggcgtggcgctaggcatcaagagaatagcgcaagggctaagtcaatcagtaatgcgaacccggcctcgatacaaaaacatgaagatgaaatcgttagtgcagataatgacgattgggatattgattatgtctgagaaatcgtcaaatgagtgaaacgcgtgaggctcgtatatcaagagctaaaagggcatttgtatccacaccgagcgttaggaaaatcttgagttacatggatagatgtagagatctatcagacctagagtctgagcctacatgcatgatggtctatggtgcttcgggtgtaggtaaaacgaccgtcatcaagaaatacttaaatcaaaacagaagagagtccgaagccgggggcgatataataccggttttgcatattgagttgccagacaatgcgaagccagtagatgcagcaagggaattgctggttgaaatgggtgacccgctagcactttatgaaactgacttagctagattgacgaaaagactgactgaattaatccctgcggtcggcgtgaagctgattattatcgatgagttccaacatttggtggaagaaaggtcaaatcgggttcttacccaagtaggtaattggctaaaaatgatacttaacaaaacgaaatgtccaattgttatatttggtatgccatactcaaaagttgtactgcaagcaaactcgcaacttcacgggcgattttccattcaggttgaactgcgcccctttagctaccagggaggtagaggtgtatttaaaacttttttggaataccttgataaagccctaccttttgaaaaacaggctggcttagccaacgaaagtttgcagaaaaaattgtatgcattctctcagggaaacatgcgttcgttgagaaaccttatttatcaagcatctatcgaagcaattgataatcagcatgagacgataaccgaagaagatttcgtttttgcatcgaagttgacatcgggcgataaacccaactcatggaaaaatccttttgaggagggtgttgaggtaacagaagatatgttacgaccgccaccaaaagatattggttgggaggactatttgagacattcaaccccgagagtgagtaaaccaggtagaaataaaaactttttcgaataacctaggctgctgcgctgctgccaccgctgagcaataactagcataaccccttggggcctctaaacgggtcttgaggggttttttgctgaaacctcaggcatttgttgttgatacaaccataaaatgataattacacccataaattgataattatcacacccataaattgatattgcctcttcatggtctaaacttcagtaagtttacgacattttcctcgaggtcatttccggggatccatggagaaaaaaatcactggatataccaccgttgatatatcccaatggcatcgtaaagaacattttgaggcatttcagtcagttgctcaatgtacctataaccagaccgttcagctggatattacggcctttttaaagaccgtaaagaaaaataagcacaagttttatccggcctttattcacattcttgcccgcctgatgaatgctcatccggagttccgtatggcaatgaaagacggtgagctggtgatatgggatagtgttcacccttgttacaccgttttccatgagcaaactgaaacgttttcatcgctctggagtgaataccacgacgatttccggcagtttctacacatatattcgcaagatgtggcgtgttacggtgaaaacctggcctatttccctaaagggtttattgagaatatgtttttcgtctcagccaatccctgggtgagtttcaccagttttgatttaaacgtggccaatatggacaacttcttcgcccccgttttcactatgggcaaatattatacgcaaggcgacaaggtgctgatgccgctggcgattcaggttcatcatgccgtttgtgatggcttccatgtcggcagaatgcttaatgaattacaacagtactgcgatgagtggcagggcggggcgtaatttttttaaggcagttattggtgcccttctagagtccttactgcagtagttttgctgaaatactcgattcacaaaaatatcaacttatggttgttttgtgagatatcaatatatggttgttttgtggttaagttgctgattataaataattattaaatatcactttatggttgcatcaacaggtaccgagctcgaattcactggccgtcgttttacaacgtcgtgactgggaaaaccctggcgttacccaacttaatcgccttgctatcgtggccggatcttgcggcccctcggcttgaacgaattgttagacattatttgccgactaccttggtgatctcgcctttcacgtagtggacaaattcttccaactgatctgcgcgcgaggccaagcgatcttcttcttgtccaagataagcctgtctagcttcaagtatgacgggctgatactgggccggcaggcgctccattgcccagtcggcagcgacatccttcggcgcgattttgccggttactgcgctgtaccaaatgcgggacaacgtaagcactacatttcgctcatcgccagcccagtcgggcggcgagttccatagcgttaaggtttcatttagcgcctcaaatagatcctgttcaggaaccggatcaaagagttcctccgccgctggacctaccaaggcaacgctatgttctcttgcttttgtcagcaagatagccagatcaatgtcgatcgtggctggctcgaagatacctgcaagaatgtcattgcgctgccattctccaaattgcagttcgcgcttagctggataacgccacggaatgatgtcgtcgtgcacaacaatggtgacttctacagcgcggagaatctcgctctctccaggggaagccgaagtttccaaaaggtcgttgatcaaagctcgccgcgttgtttcatcaagccttacggtcaccgtaaccagcaaatcaatatcactgtgtggcttcaggccgccatccactgcggagccgtacaaatgtacggccagcaacgtcggttcgagatggcgctcgatgacgccaactacctctgatagttgagtcgatacttcggcgatcaccgcttccctcatactcttcctttttcaatattattgaagcatttatcagggttattgtctcatgagcggatacatatttgaatgtatttagaaaaataaacaaatagctagctcactcggtcgctacgctccgggcgtgagactgcggcgggcgctgcggacacatacaaagttacccacagattccgtggataagcaggggactaacatgtgaggcaaaacagcagggccgcgccggtggcgtttttccataggctccgccctcctgccagagttcacataaacagacgcttttccggtgcatctgtgggagccgtgaggctcaaccatgaatctgacagtacgggcgaaacccgacaggacttaaagatccccaccgtttccggcgggtcgctccctcttgcgctctcctgttccgaccctgccgtttaccggatacctgttccgcctttctcccttacgggaagtgtggcgctttctcatagctcacacactggtatctcggctcggtgtaggtcgttcgctccaagctgggctgtaagcaagaactccccgttcagcccgactgctgcgccttatccggtaactgttcacttgagtccaacccggaaaagcacggtaaaacgccactggcagcagccattggtaactgggagttcgcagaggatttgtttagctaaacacgcggttgctcttgaagtgtgcgccaaagtccggctacactggaaggacagatttggttgctgtgctctgcgaaagccagttaccacggttaagcagttccccaactgacttaaccttcgatcaaaccacctccccaggtggttttttcgtttacagggcaaaagattacgcgcagaaaaaaaggatctcaagaagatcctttgatcttttctactgaaccgctctagatttcagtgcaatttatctcttcaaatgtagcacctgaagtcagccccatacgatataagttgtaattctcatgttagtcatgccccgcgcccaccggaaggagctgactgggttgaaggctctcaagggcatcggtcgagatcccggtgcctaatgagtgagctaacttacattaattgcgttgcgctcactgcccgctttccagtcgggaaacctgtcgtgccagctgcattaatgaatcggccaacgcgcggggagaggcggtttgcgtattgggcgccagggtggtttttcttttcaccagtgagacgggcaacagctgattgcccttcaccgcctggccctgagagagttgcagcaagcggtccacgctggtttgccccagcaggcgaaaatcctgtttgatggtggttaacggcgggatataacatgagctgtcttcggtatcgtcgtatcccactaccgagatgtccgcaccaacgcgcagcccggactcggtaatggcgcgcattgcgcccagcgccatctgatcgttggcaaccagcatcgcagtgggaacgatgccctcattcagcatttgcatggtttgttgaaaaccggacatggcactccagtcgccttcccgttccgctatcggctgaatttgattgcgagtgagatatttatgccagccagccagacgcagacgcgccgagacagaacttaatgggcccgctaacagcgcgatttgctggtgacccaatgcgaccagatgctccacgcccagtcgcgtaccgtcttcatgggagaaaataatactgttgatgggtgtctggtcagagacatcaagaaataacgccggaacattagtgcaggcagcttccacagcaatggcatcctggtcatccagcggatagttaatgatcagcccactgacgcgttgcgcgagaagattgtgcaccgccgctttacaggcttcgacgccgcttcgttctaccatcgacaccaccacgctggcacccagttgatcggcgcgagatttaatcgccgcgacaatttgcgacggcgcgtgcagggccagactggaggtggcaacgccaatcagcaacgactgtttgcccgccagttgttgtgccacgcggttgggaatgtaattcagctccgccatcgccgcttccactttttcccgcgttttcgcaga

SEQ ID NO: 43 - DNA, 13401 bp, artificial sequence
  Synthetic
ccgccgtgggtttcctcgcaataagcccggcccacgcctcatgcgctttgcgttccgtttgcacccagtgaccgggcttgttcttggcttgaatgccgatttctctggactgcgtggccatgcttatctccatgcggtaggggtgccgcacggttgcggcaccatgcgcaatcagctgcaacttttcggcagcgcgacaacaattatgcgttgcgtaaaagtggcagtcaattacagattttctttaacctacgcaatgagctattgcggggggtgccgcaatgagctgttgcgtaccccccttttttaagttgttgatttttaagtctttcgcatttcgccctatatctagttctttggtgcccaaagaagggcacccctgcggggttcccccacgccttcggcgcggctccccctccggcaaaaagtggcccctccggggcttgttgatcgactgcgcggccttcggccttgcccaaggtggcgctgcccccttggaacccccgcactcgccgccgtgaggctcggggggcaggcgggcgggcttcgcccttcgactgcccccactcgcataggcttgggtcgttccaggcgcgtcaaggccaagccgctgcgcggtcgctgcgcgagccttgacccgccttccacttggtgtccaaccggcaagcgaagcgcgcaggccgcaggccggaggcttttccccagagaaaattaaaaaaattgatggggcaaggccgcaggccgcgcagttggagccggtgggtatgtggtcgaaggctgggtagccggtgggcaatccctgtggtcaagctcgtgggcaggcgcagcctgtccatcagcttgtccagcagggttgtccacgggccgagcgaagcgagccagccggtggccgctcgcggccatcgtccacatatccacgggctggcaagggagcgcagcgaccgcgcagggcgaagcccggagagcaagcccgtagggcgccgcagccgccgtaggcggtcacgactttgcgaagcaaagtctagtgagtatactcaagcattgagtggcccgccggaggcaccgccttgcgctgcccccgtcgagccggttggacaccaaaagggaggggcaggcatggcggcatacgcgatcatgcgatgcaagaagctggcgaaaatgggcaacgtggcggccagtctcaagcacgcctaccgcgagcgcgagacgcccaacgctgacgccagcaggacgccagagaacgagcactgggcggccagcagcaccgatgaagcgatgggccgactgcgcgagttgctgccagagaagcggcgcaaggacgctgtgttggcggtcgagtacgtcatgacggccagcccggaatggtggaagtcggccagccaagaacagcaggcggcgttcttcgagaaggcgcacaagtggctggcggacaagtacggggcggatcgcatcgtgacggccagcatccaccgtgacgaaaccagcccgcacatgaccgcgttcgtggtgccgctgacgcaggacggcaggctgtcggccaaggagttcatcggcaacaaagcgcagatgacccgcgaccagaccacgtttgcggccgctgtggccgatctagggctgcaacggggcatcgagggcagcaaggcacgtcacacgcgcattcaggcgttctacgaggccctggagcggccaccagtgggccacgtcaccatcagcccgcaagcggtcgagccacgcgcctatgcaccgcagggattggccgaaaagctgggaatctcaaagcgcgttgagacgccggaagccgtggccgaccggctgacaaaagcggttcggcaggggtatgagcctgccctacaggccgccgcaggagcgcgtgagatgcgcaagaaggccgatcaagcccaagagacggcccgtgaccttcgggagcgcctgaagcccgttctggacgccctggggccgttgaatcgggatatgcaggccaaggccgccgcgatcatcaaggccgtgggcgaaaagctgctgacggaacagcgggaagtccagcgccagaaacaggcccagcgccagcaggaacgcgggcgcgcacatttccccgaaaagtgccacctgggatgaatgtcagctactgggctatctggacaagggaaaacgcaagcgcaaagagaaagcaggtagcttgcagtgggcttacatggcgatagctagactgggcggttttatggacagcaagcgaaccggaattgccagctggggcgccctctggtaaggttgggaagccctgcaaagtaaactggatggctttcttgccgccaaggatctgatggcgcaggggatcaagatctgatcaagagacaggatgaggatcgtttcgcatgattgaacaagatggattgcacgcaggttctccggccgcttgggtggagaggctattcggctatgactgggcacaacagacaatcggctgctctgatgccgccgtgttccggctgtcagcgcaggggcgcccggttctttttgtcaagaccgacctgtccggtgccctgaatgaactgcaagacgaggcagcgcggctatcgtggctggccacgacgggcgttccttgcgcagctgtgctcgacgttgtcactgaagcgggaagggactggctgctattgggcgaagtgccggggcaggatctcctgtcatctcaccttgctcctgccgagaaagtatccatcatggctgatgcaatgcggcggctgcatacgcttgatccggctacctgcccattcgaccaccaagcgaaacatcgcatcgagcgagcacgtactcggatggaagccggtcttgtcgatcaggatgatctggacgaagagcatcaggggctcgcgccagccgaactgttcgccaggctcaaggcgcgcatgcccgacggcgaggatctcgtcgtgacccatggcgatgcctgcttgccgaatatcatggtggaaaatggccgcttttctggattcatcgactgtggccggctgggtgtggcggaccgctatcaggacatagcgttggctacccgtgatattgctgaagagcttggcggcgaatgggctgaccgcttcctcgtgctttacggtatcgccgctcccgattcgcagcgcatcgccttctatcgccttcttgacgagttcttctgagcgggactctggggttcgaaatgaccgaccaagcgacgcccaacctgccatcacgagatttcgattccaccgccgccttctatgaaaggttgggcttcggaatcgttttccgggacgccggctggatgatcctccagcgcggggatctcatgctggagttcttcgcccacccccatgggcaaatattatacgcaaggcgacaaggtgctgatgccgctggcgattcaggttcatcatgccgtttgtgatggcttccatgtcggcagaatgcttaatgaattacaacagtttttatgcatgcgcccaatacgcaaaccgcctctccccgcgcgttggccgattcattaatgcagctggcacgacaggtttcccgactggtggataaccgtattaccgcctttgagtgagctgataccgctcgccgcagccgaactaccgagcgcagcgagtcagtgagcgaagctttgttgatacaaccataaaatgataattacacccataaattgataattatcacacccataaattgatattgcctcttcatggtctaaacttcagtaagtttacgacattttcctcgaaccgtattaccgcctttgagtgagctgataccgctcgccgcagccgaacgaccgagcgcagcgagtcagtgagcgaggacacaagctttgacagctagctcagtcctaggtataatactagcgtcgacgtggagatataccatgggtgaactgccgagtaggtagctgataacagtacagcgcggctgaaatcatcattaaagcggtgaactgccgagtaggtagctgataacggatccgaattcgagcgaaggagatatacatatgtttttgcaaagacctaaaccttacagcgatgaaagtttagaaagtttctttatccgagtggctaacaaaaatggctacggtgatgtccatcgcttcctagaagccactaaacgattccttcaagacattgaccataatggctatcaaacctttccgactgatataactcggataaacccatactcagctaaaaacagttccagcgcacgaactgcgtcattcctgaaacttgcacaattgacatttaatgaaccgccagagctacttgggttggcaattaacagaacaaacatgaaatactcgccgtcaactagcgcggttgttagaggtgcagaagtctttcctcgcagtttactacggacgcactccatcccctgctgtcctttgtgtctgcgagaaaatggctacgcctcctacctttggcactttcaggggtacgaatactgccacagccataacgtacctttaattaccacttgtagctgtggtaaggagtttgactaccgagtatctgggttaaagggcatttgctgcaaatgcaaggagcctatcaccttaaccagcagggagaacggtcatgaggcagcgtgtactgtttcaaactggcttgctggccatgaatctaaacctctgccaaatcttcctaaaagctaccgatggggtttagttcattggtggatgggtattaaagatagcgagttcgatcacttttcgttcgttcaatttttctcaaactggccaaggtcattccactcgataatcgaagatgaagtagagttcaaccttgagcatgctgttgtcagcacgtctgaattacgactaaaagatcttcttggtcgattgtttttcggttcaattcggttacctgagcggaatcttcaacacaatatcatccttggtgagcttctctgctatttagaaaatcgtttatggcaagacaagggattaatcgccaacctcaaaatgaacgcgttagaggcgactgtaatgttaaattgtagcctcgatcagattgcatcaatggttgaacaacgcatcttgaagccaaatcgaaaaagcaagcccaacagccctcttgatgttaccgattatctatttcatttcggcgatattttctgtctttggttagctgagttccaaagcgatgagtttaaccgttcgttttatgtgtcgaggtggtaaatgcaaactctgaaagaactaatcgcatccaatcctgacgacttaacaactgaacttaagagagcatttcgtccactcacaccgcatattgcaattgatggtaatgaacttgacgcactgacgatattagtcaatttaaccgataagactgatgatcagaaagacctgctcgatcgagccaaatgcaagcaaaaacttcgagatgaaaaatggtgggctagctgcataaattgcgttaattacagacaaagccataacccaaaattcccggatatacgttctgaaggcgtgattcgaacccaagccctgggtgaattaccgagtttcctactctcgtcctcaaaaatcccaccataccattggtcatatagccatgattcaaaatacgtcaacaaaagcgcattcctcaccaatgagttttgttgggatggtgagatctcatgtttgggtgagcttcttaaagatgcagatcacccactttggaatactttgaaaaagttaggttgttctcaaaaaacttgcaaagcaatggcaaaacaactagctgatattactctcacgactatcaatgtcacactcgcaccaaattacctgactcaaatatctctccccgatagtgatacatcctacatttcactctctcctgttgcatcgctatcgatgcaaagccactttcatcagaggctccaagatgaaaatcggcatagcgcgataacgcggtttagccgaactaccaacatgggggtcactgcgatgacatgtggcggcgcatttagaatgttaaagtctggcgctaagttttccagcccccctcatcaccgattaaacagtaaacgaagttggttgacgtcagagcatgttcagtcattaaaacagtaccagcgcctcaacaaaagcctcatacctgaaaactctcggattgcactccgtagaaaatacaaaatcgagcttcaaaatatggtcagatcttggtttgcaatgcaagaccatacccttgattcgaacatacttatccaacatttgaatcatgacctatcttacttaggagccacaaaacgttttgcatacgatccagcgatgaccaagctctttactgagcttttgaaacgagagttatcaaattcaatcaataatggtgagcaacacactaatggatcgtttttagtcctaccgaatatcagggtttgtggcgcaacagctttaagctccccggtaacggtggggattccatcacttacagctttctttggcttcgttcacgcatttgaacggaatataaatcgcaccacctcatcgtttcgtgttgaatcctttgcgatatgcgtccatcaactacatgtcgagaagcgaggtttgacagcagagtttgtggaaaaaggcgacgggactatatccgctcccgcgacccgggatgactggcagtgtgatgtcgtatttagccttattttgaacaccaactttgctcaacatattgaccaagatacgttagttacatcactaccaaagcgattggctcggggttcagcaaaaattgcgattgatgactttaaacatatcaactcattctcgacattagaaacagcgatcgaatctctgccaatagaagctggtaggtggttatcactttacgcacagtcaaacaataatctaagtgatctattagcagccatgacagaggaccatcagctcatggcaagctgcgtcggttaccacttgttagaagagcccaaagataaaccaaactccctcagaggttacaaacacgctatcgccgagtgcatcattggactcattaactcaatcacctttagctcagagactgatcccaacacaatcttttggtcgctaaagaactatcaaaactacctagtggtacagccaaggagtatcaacgatgaaactaccgacaaatctagcctatgagcgctctatcgacccatcagatgtctgtttttttgtcgtctggcccgatgatagaaaaacacctttaacctacaattctcgtactctgctcgggcaaatggaagcggcatcattagcctatgatgtctcaggtcaaccaataaaaagtgccaccgctgaggcgttagctcaagggaaccctcatcaagttgatttctgccacgttccatacggtgcgagtcatattgaatgcagtttctccgtctcgttttcttctgaactacgtcaaccatataagtgtaactcaagcaaagttaaacaaacgctagtgcaattagtcgagctctacgaaacgaaaatcggctggactgagctagcaacccgatatttgatgaacatttgcaacggtaaatggctgtggaaaaatacccgtaaagcctattgctggaacattgtacttacaccttggccttggaacggggaaaaggttggatttgaagatattcgtactaactacacctcacggcaagactttaaaaataataaaaattggtctgctatagttgaaatgatcaaaaccgcattttctagtactgatgggctggcgatatttgaagtcagggccaccttgcacttgccaacgaatgctatggtgcggccaagccaagttttcacagaaaaagaaagtggcagtaaaagtaaatctaaaactcaaaacagtcgagtttttcagagtacaactattgatggtgaacgatcgccaatactaggggcctttaaaacgggagcagctattgcaaccattgacgactggtatcctgaagccactgagccactaagggtcggacggtttggggttcatcgcgaagatgtcacttgctaccgtcatccgtctaccggaaaagattttttctcgatattacaacaagcagagcactatattgaagtgttgagcgccaacaaaactcccgctcaagaaactatcaacgacatgcactttttaatggctaacctgattaagggtgggatgttccagcataaaggagactgactgtgaaatggtattataagacaatcacctttctgccagagttgtgcaacaacgagtcactggctgcaaagtgtctccgcgttctgcatggatttaactatcagtatgagacacgaaatatcggcgtttcatttccgctttggtgtgatgcaacggttggaaaaaagatttcatttgtcagcaagaacaagatagaactcgacttactacttaaacaacactatttcgtccaaatggaacaacttcaatactttcatatatccaacactgttctcgtcccagaagattgtacatacgtttcctttagacgctgtcaatctatagataagctcacagcagcagggctggcaaggaaaatcagacgcctggagaaacgtgctctatctagaggcgagcaatttgacccatcatcttttgctcaaaaagagcatactgcaatagcgcactaccactcacttggggagtccagcaaacagacgaaccgcaactttcgactcaatatcaggatgctctcggagcaaccccgtgaggggaactcgatttttagtagctatggcttatcaaattcagaaaactcgtttcagcctgtacccttaatctgacctttaataaggagatataccatggcgacaagtttacctacgccctcagcaattacgacttcggcgttagagtatgcattccatactcccgctcgcaatctaacgaaatctcgcggaaaaaacattcatcgttatgtcagtgtaaagatgagtaagaggattacggtagaatctactctagagtgtgatgcctgctatcactttgattttgagccaagtattgttcgcttttgcgctcaaccgattcgatttttatattatctcaatggtcagtctcactcctatgttcctgactttctagttcaatttgataccaacgagtttgttctatatgaagtaaagtcagcttatgctaagaacaaacctgattttgatgttgaatgggaggcgaaagtaaaagcagcaactgaactagggctagaattggagcttgttgaagagagtgatattagggatacggttgtattaaataatcttaagcgcatgcatcgttatgcttcgaaagatgagctgaataacgtacataactctctcttaaaaataataaagtacaatggcgcccaatctgcaagatgcttgggagaacagttgggtttaaaaggccgaactgttttaccaattttgtgcgatttgctgtcaaggtgtttactcgatacacgtttggataagcctctatctcttgaatctcgatttgagttggccagttatggctaagaaagggttctcaagtttccatagaaaagcagtctcttcccaagatacgcttgaatcgatagagcttgtctctagcgctaattgtctagaaagtgttacgtatcaagatatatcagcatttcccgaaacaattgcggtagagattaatttccgattaagcattcttcgctttttagcgcgaaagtgcgaaaccattgtggccaaatcaattgaaccacatcgtgtagagctacagcaaaactatagtagaaaaatacccagtgcaataacgatatatcgatggtggcttgcttttcgaaaatcagactacaaccccattagcttagcacctaatatcaaggatagaggtaatagagagacaaaagtgtcaacagttgttgattctattatggaacaggcagttgaaagagttatatctggacgaaaagtcaatgttagctctgcatataaacgtgttcgacgaaaagttcgtcaatacaatctaactcatggaacgaaatacacgtatcctaagtacgaatctgtaagaaagcgagtaaaaaagaaaaccccatttgagttattagccgcagggaaaggggagagagtagctaagagagagtttcgccgaatgggaaaaaagatcctcacgtctagcgtgctagagagggttgaaatagatcacactgtcgttgacctttttgcagtacacgaagagtatcgaatcccattgggccgaccttggcttactcaattggttgattgttacagtaaagctgtaatcggtttttatttaggtttcgagcctcctagctatgtgtcggtttcccttgcacttaagaatgcaatacaacgcaaagatgacttaatctcctcgtatgaatcgatcgagaatgaatggctatgttatggcatcccagacctactcgtaactgataatggtaaagagtttttgtcgaaagcatttgatcaagcatgtgaatcactattgatcaatgtgcatcaaaataaagttgagacgcccgacaacaaacctcatgttgaacgtaactacgggactattaatacttctctgttagacgatttacctgggaaatccttcagccagtaccttcaaagagaagggtacgactctgtgggagaagctacccttacactcaatgagattagagaaatttacttaatttggttggtggatatttatcataaaaaacccaatcagagaggcactaattgtcctaatgttgcgtggaaaaagggttgtcaagaatgggaaccagaggagttctctggttctaaagacgaattagactttaaatttgctattgttgattacaaacaacttactaaagtagggataactgtctacaaagaactgagttatagcaatgaccgtttagctgaatatagagggaagaaaggaaaccataaagttcagttcaagtataaccctgagtgtatggcagttatttgggtgttggatgaggatatgaatgagtactttacagttaatgcgattgactacgaatatgcaagtagagtatcactttggcaacataaatataacatgaaatatcaagcagaactaaattcagcagaatatgatgaggacaaggaaattgatgcagaaataaaaattgaagaaatcgcagatcgttcaattgttaagactaacaaaatcagagctcggaggcgtggcgctaggcatcaagagaatagcgcaagggctaagtcaatcagtaatgcgaacccggcctcgatacaaaaacatgaagatgaaatcgttagtgcagataatgacgattgggatattgattatgtctgagaaatcgtcaaatgagtgaaacgcgtgaggctcgtatatcaagagctaaaagggcatttgtatccacaccgagcgttaggaaaatcttgagttacatggatagatgtagagatctatcagacctagagtctgagcctacatgcatgatggtctatggtgcttcgggtgtaggtaaaacgaccgtcatcaagaaatacttaaatcaaaacagaagagagtccgaagccgggggcgatataataccggttttgcatattgagttgccagacaatgcgaagccagtagatgcagcaagggaattgctggttgaaatgggtgacccgctagcactttatgaaactgacttagctagattgacgaaaagactgactgaattaatccctgcggtcggcgtgaagctgattattatcgatgagttccaacatttggtggaagaaaggtcaaatcgggttcttacccaagtaggtaattggctaaaaatgatacttaacaaaacgaaatgtccaattgttatatttggtatgccatactcaaaagttgtactgcaagcaaactcgcaacttcacgggcgattttccattcaggttgaactgcgcccctttagctaccagggaggtagaggtgtatttaaaacttttttggaataccttgataaagccctaccttttgaaaaacaggctggcttagccaacgaaagtttgcagaaaaaattgtatgcattctctcagggaaacatgcgttcgttgagaaaccttatttatcaagcatctatcgaagcaattgataatcagcatgagacgataaccgaagaagatttcgtttttgcatcgaagttgacatcgggcgataaacccaactcatggaaaaatccttttgaggagggtgttgaggtaacagaagatatgttacgaccgccaccaaaagatattggttgggaggactatttgagacattcaaccccgagagtgagtaaaccaggtagaaataaaaactttttcgaataacctaggctgctgcgctgctgccaccgctgagcaataactagcataaccccttggggcctctaaacgggtcttgaggggttttttgctgaaacctcaggcatttgagtccttactgcagtagttttgctgaaatactcgattcacaaaaatatcaacttatggttgttttgtgagatatcaatatatggttgttttgtggttaagttgctgattataaataattattaaatatcactttatggttgcatcaacaggtaccgagctcgaattcactggccgtcgttttacaacgtcgtgactgggaaaaccctggcgttacccaacttaatcgccttgcggccagtttgctcaggctctccccgtggaggtaataattgacgatatgatcatttattctgcctcccagagcctgataaaaacggtgaatccgttagcgaggtgccgccggcttccattcaggtcgaggtggcccggctccatgcaccgcgacgcaacgcggggaggcagacaaggtatagggcggcgaggcggctacagccgatagtctggaacagcgcacttacgggttgctgcgcaacccaagtgctaccggcgcggcagcgtgacccgtgtcggcggctccaacggctcgccatcgtccagaaaacacggctcatcgggcatcggcaggcgctgctgcccgcgccgttcccattcctccgtttcggtcaaggctggcaggtctggttccatgcccggaatgccgggctggctgggcggctcctcgccggggccggtcggtagttgctgctcgcccggatacagggtcgggatgcggcgcaggtcgccatgccccaacagcgattcgtcctggtcgtcgtgatcaaccaccacggcggcactgaacaccgacaggcgcaactggtcgcggggctggccccacgccacgcggtcattgaccacgtaggccgacacggtgccggggccgttgagcttcacgacggagatccagcgctcggccaccaagtccttgactgcgtattggaccgtccgcaaagaacgtccgatgagcttggaaagtgtcttctggctgaccaccacggcgttctggtggcccatctgcgccacgaggtgatgcagcagcattg

SEQ ID NO: 44 - DNA, 4658 bp, artificial sequence
  Synthetic
gcgcccaatacgcaaaccgcctctccccgcgcgttggccgattcattaatgcagctggcacgacaggtttcccgactggaaagcgggcagtgagcgcaacgcaattaatgtgagttagctcactcattaggcaccccaggctttacactttatgcttccggctcgtatgttgtgtggaattgtgagcggataacaatttcacacaggaaacagctatgaccatgattacgccaagctttgttgatacaaccataaaatgataattacacccataaattgataattatcacacccataaattgatattgcctcttcatggtctaaacttcagtaagtttacgacattttcatgaagaggtcatttccgggcggcctattggttaaaaaatgagctgatttaacaaaaatttaacgcgaattaattgacattgattattgactagttattaatagtaatcaattacggggtcattagttcatagcccatatatggagttccgcgttacataacttacggtaaatggcccgcctggctgaccgcccaacgacccccgcccattgacgtcaataatgacgtatgttcccatagtaacgccaatagggactttccattgacgtcaatgggtggagtatttacggtaaactgcccacttggcagtacatcaagtgtatcatatgccaagtacgccccctattgacgtcaatgacggtaaatggcccgcctggcattatgcccagtacatgaccttatgggactttcctacttggcagtacatctacgtattagtcatcgctattaccatggtgatgcggttttggcagtacatcaatgggcgtggatagcggtttgactcacggggatttccaagtctccaccccattgacgtcaatgggagtttgttttggcaccaaaatcaacgggactttccaaaatgtcgtaacaactccgccccattgacgcaaatgggcggtaggcgtgtacggtgggaggtctatataagcagagctctctggctaactagagaacccactgcttactggcttatcgaaattaatagcactggacatcacgaagcttaccggtagccaccatgaccgagtacaagcccacggtgcgcctcgccacccgcgacgacgtccccagggccgtacgcaccctcgccgccgcgttcgccgactaccccgccacgcgccacaccgtcgatccggaccgccacatcgagcgggtcaccgagctgcaagaactcttcctcacgcgcgtcgggctcgacatcggcaaggtgtgggtcgcggacgacggcgccgcggtggcggtctggaccacgccggagagcgtcgaagcgggggcggtgttcgccgagatcggcccgcgcatggccgagttgagcggttcccggctggccgcgcagcaacagatggaaggcctcctggcgccgcaccggcccaaggagcccgcgtggttcctggccaccgtcggagtctcgcccgaccaccagggcaagggtctgggcagcgccgtcgtgctccccggagtggaggcggccgagcgcgccggggtgcccgccttcctggagacctccgcgccccgcaacctccccttctacgagcggctcggcttcaccgtcaccgccgacgtcgaggtgcccgaaggaccgcgcacctggtgcatgacccgcaagcccggtgcctgagcgggactctggggttcgaaatgaccgaccaagcgacgcccaacctgccatcacgagatttcgattccaccgccgccttctatgaaaggttgggcttcggaatcgttttccgggacgccggctggatgatcctccagcgcggggatctcatgctggagttcttcgcccaccccaacttgtttattgcagcttataatggttacaaataaagcaatagcatcacaaatttcacaaataaagcatttttttcactgcattctagttgtggtttgtccaaactcatcaatgtatcttatcatgtctgtataccgtcgacctctagctagagcttggcgtaatcatggtcatagctgtttcctgtgtgaaattgttatccgctcacaattccacacaacatacgagcagtccttactgcagtagttttgctgaaatactcgattcacaaaaatatcaacttatggttgttttgtgagatatcaatatatggttgttttgtggttaagttgctgattataaataattattaaatatcactttatggttgcatcaacaggtaccgagctcgaattcactggccgtcgttttacaacgtcgtgactgggaaaaccctggcgttacccaacttaatcgccttgcagcacatccccctttcgccagctggcgtaatagcgaagaggcccgcaccgatcgcccttcccaacagttgcgcagcctgaatggcgaatggcgcctgatgcggtattttctccttacgcatctgtgcggtatttcacaccgcatatggtgcactctcagtacaatctgctctgatgccgcatagttaagccagccccgacacccgccaacacccgctgacgcgccctgacgggcttgtctgctcccggcatccgcttacagacaagctgtgaccgtctccgggagctgcatgtgtcagaggttttcaccgtcatcaccgaaacgcgcgagacgaaagggcctcgtgatacgcctatttttataggttaatgtcatgataataatggtttcttagacgtcaggtggcacttttcggggaaatgtgcgcggaacccctatttgtttatttttctaaatacattcaaatatgtatccgctcatgagacaataaccctgataaatgcttcaataatattgaaaaaggaagagtatgagtattcaacatttccgtgtcgcccttattcccttttttgcggcattttgccttcctgtttttgctcacccagaaacgctggtgaaagtaaaagatgctgaagatcagttgggtgcacgagtgggttacatcgaactggatctcaacagcggtaagatccttgagagttttcgccccgaagaacgttttccaatgatgagcacttttaaagttctgctatgtggcgcggtattatcccgtattgacgccgggcaagagcaactcggtcgccgcatacactattctcagaatgacttggttgagtactcaccagtcacagaaaagcatcttacggatggcatgacagtaagagaattatgcagtgctgccataaccatgagtgataacactgcggccaacttacttctgacaacgatcggaggaccgaaggagctaaccgcttttttgcacaacatgggggatcatgtaactcgccttgatcgttgggaaccggagctgaatgaagccataccaaacgacgagcgtgacaccacgatgcctgtagcaatggcaacaacgttgcgcaaactattaactggcgaactacttactctagcttcccggcaacaattaatagactggatggaggcggataaagttgcaggaccacttctgcgctcggcccttccggctggctggtttattgctgataaatctggagccggtgagcgtgggtctcgcggtatcattgcagcactggggccagatggtaagccctcccgtatcgtagttatctacacgacggggagtcaggcaactatggatgaacgaaatagacagatcgctgagataggtgcctcactgattaagcattggtaactgtcagaccaagtttactcatatatactttagattgatttaaaacttcatttttaatttaaaaggatctaggtgaagatcctttttgataatctcatgaccaaaatcccttaacgtgagttttcgttccactgagcgtcagaccccgtagaaaagatcaaaggatcttcttgagatcctttttttctgcgcgtaatctgctgcttgcaaacaaaaaaaccaccgctaccagcggtggtttgtttgccggatcaagagctaccaactctttttccgaaggtaactggcttcagcagagcgcagataccaaatactgttcttctagtgtagccgtagttaggccaccacttcaagaactctgtagcaccgcctacatacctcgctctgctaatcctgttaccagtggctgctgccagtggcgataagtcgtgtcttaccgggttggactcaagacgatagttaccggataaggcgcagcggtcgggctgaacggggggttcgtgcacacagcccagcttggagcgaacgacctacaccgaactgagatacctacagcgtgagctatgagaaagcgccacgcttcccgaagggagaaaggcggacaggtatccggtaagcggcagggtcggaacaggagagcgcacgagggagcttccagggggaaacgcctggtatctttatagtcctgtcgggtttcgccacctctgacttgagcgtcgatttttgtgatgctcgtcaggggggcggagcctatggaaaaacgccagcaacgcggcctttttacggttcctggccttttgctggccttttgctcacatgttctttcctgcgttatcccctgattctgtggataaccgtattaccgcctttgagtgagctgataccgctcgccgcagccgaacgaccgagcgcagcgagtcagtgagcgaggaagcggaaga

SEQ ID NO: 45 - DNA, 3455 bp, artificial sequence
  Synthetic
tttcggggaaatgtgcgcggaacccctatttgtttatttttctaaatacattcaaatatgtatccgctcatgagacaataaccctgataaatgcttcaataatattgaaaaaggaagagtatgagtattcaacatttccgtgtcgcccttattcccttttttgcggcattttgccttcctgtttttgctcacccagaaacgctggtgaaagtaaaagatgctgaagatcagttgggtgcacgagtgggttacatcgaactggatctcaacagcggtaagatccttgagagttttcgccccgaagaacgttttccaatgatgagcacttttaaagttctgctatgtggcgcggtattatcccgtattgacgccgggcaagagcaactcggtcgccgcatacactattctcagaatgacttggttgagtactcaccagtcacagaaaagcatcttacggatggcatgacagtaagagaattatgcagtgctgccataaccatgagtgataacactgcggccaacttacttctgacaacgatcggaggaccgaaggagctaaccgcttttttgcacaacatgggggatcatgtaactcgccttgatcgttgggaaccggagctgaatgaagccataccaaacgacgagcgtgacaccacgatgcctgtagcaatggcaacaacgttgcgcaaactattaactggcgaactacttactctagcttcccggcaacaattaatagactggatggaggcggataaagttgcaggaccacttctgcgctcggcccttccggctggctggtttattgctgataaatctggagccggtgagcgtggctctcgcggtatcattgcagcactggggccagatggtaagccctcccgtatcgtagttatctacacgacggggagtcaggcaactatggatgaacgaaatagacagatcgctgagataggtgcctcactgattaagcattggtaactgtcagaccaagtttactcatatatactttagattgatttaaaacttcatttttaatttaaaaggatctaggtgaagatcctttttgataatctcatgaccaaaatcccttaacgtgagttttcgttccactgagcgtcagaccccgtagaaaagatcaaaggatcttcttgagatcctttttttctgcgcgtaatctgctgcttgcaaacaaaaaaaccaccgctaccagcggtggtttgtttgccggatcaagagctaccaactctttttccgaaggtaactggcttcagcagagcgcagataccaaatactgttcttctagtgtagccgtagttaggccaccacttcaagaactctgtagcaccgcctacatacctcgctctgctaatcctgttaccagtggctgctgccagtggcgataagtcgtgtcttaccgggttggactcaagacgatagttaccggataaggcgcagcggtcgggctgaacggggggttcgtgcacacagcccagcttggagcgaacgacctacaccgaactgagatacctacagcgtgagctatgagaaagcgccacgcttcccgaagggagaaaggcggacaggtatccggtaagcggcagggtcggaacaggagagcgcacgagggagcttccagggggaaacgcctggtatctttatagtcctgtcgggtttcgccacctctgacttgagcgtcgatttttgtgatgctcgtcaggggggcggagcctatggaaaaacgccagcaacgcggcctttttacggttcctggccttttgctggccttttgctcacatgttctttcctgcgttatcccctgattctgtggataaccgtattaccgcctttgagtgagctgataccgctcgccgcagccgaactaccgagcgcagcgagtcagtgagcgaggaagcggaagagcgcccaatacgcaaaccgcctctccccgcgcgttggccgattcattaatgcagcccaagctttgttgatacaaccataaaatgataattacacccataaattgataattatcacacccataaattgatattgcctcttcatggtctaaacttcagtaagtttacgacattttcatgaagaggtcatttccggggatccatggagaaaaaaatcactggatataccaccgttgatatatcccaatggcatcgtaaagaacattttgaggcatttcagtcagttgctcaatgtacctataaccagaccgttcagctggatattacggcctttttaaagaccgtaaagaaaaataagcacaagttttatccggcctttattcacattcttgcccgcctgatgaatgctcatccggagttccgtatggcaatgaaagacggtgagctggtgatatgggatagtgttcacccttgttacaccgttttccatgagcaaactgaaacgttttcatcgctctggagtgaataccacgacgatttccggcagtttctacacatatattcgcaagatgtggcgtgttacggtgaaaacctggcctatttccctaaagggtttattgagaatatgtttttcgtctcagccaatccctgggtgagtttcaccagttttgatttaaacgtggccaatatggacaacttcttcgcccccgttttcactatgggcaaatattatacgcaaggcgacaaggtgctgatgccgctggcgattcaggttcatcatgccgtttgtgatggcttccatgtcggcagaatgcttaatgaattacaacagtactgcgatgagtggcagggcggggcgtaatttttttaaggcagttattggtgcccttctagagtccttactgcagtagttttgctgaaatactcgattcacaaaaatatcaacttatggttgttttgtgagatatcaatatatggttgttttgtggttaagttgctgattataaataattattaaatatcactttatggttgcatcaacaggtaccgagctcgaattcactggccgtcgttttacaacgtcgtgactgggaaaaccctggcgttacccaacttaatcgccttgcagcacatccccctttcgccagctggcgtaatagcgaagaggcccgcaccgatcgcccttcccaacagttgcgcagcctgaatggcgaatggcgcctgatgcggtattttctccttacgcatctgtgcggtatttcacaccgcatatggtgcactctcagtacaatctgctctgatgccgcatagttaagccagccccgacacccgccaacacccgctgacgcgccctgacgggcttgtctgctcccggcatccgcttacagacaagctgtgaccgtctccgggagctgcatgtgtcagaggttttcaccgtcatcaccgaaacgcgcgagacgaaagggcctcgtgatacgcctatttttataggttaatgtcatgataataatggtttcttagacgtcaggtggcact

SEQ ID NO: 46 - DNA, 11812 bp, artificial sequence
  Synthetic
attcaccaccctgaattgactctcttccgggcgctatcatgccataccgcgaaaggttttgcgccattcgatggtgtccgggatctcgacgctctcccttatgcgactcctgcattaggaaattaatacgactcactataggggaattgtgagcggataacaattcccctgtagaaataattttgtttaactttaataaggagatataccatgggtgaactgccgagtaggtagctgataacgcacatctgaacttcagcctccagtacagcgcgtgaactgccgagtaggtagctgataacggatccgaattcgagcgaaggagatatacatatgtttttgcaaagacctaaaccttacagcgatgaaagtttagaaagtttctttatccgagtggctaacaaaaatggctacggtgatgtccatcgcttcctagaagccactaaacgattccttcaagacattgaccataatggctatcaaacctttccgactgatataactcggataaacccatactcagctaaaaacagttccagcgcacgaactgcgtcattcctgaaacttgcacaattgacatttaatgaaccgccagagctacttgggttggcaattaacagaacaaacatgaaatactcgccgtcaactagcgcggttgttagaggtgcagaagtctttcctcgcagtttactacggacgcactccatcccctgctgtcctttgtgtctgcgagaaaatggctacgcctcctacctttggcactttcaggggtacgaatactgccacagccataacgtacctttaattaccacttgtagctgtggtaaggagtttgactaccgagtatctgggttaaagggcatttgctgcaaatgcaaggagcctatcaccttaaccagcagggagaacggtcatgaggcagcgtgtactgtttcaaactggcttgctggccatgaatctaaacctctgccaaatcttcctaaaagctaccgatggggtttagttcattggtggatgggtattaaagatagcgagttcgatcacttttcgttcgttcaatttttctcaaactggccaaggtcattccactcgataatcgaagatgaagtagagttcaaccttgagcatgctgttgtcagcacgtctgaattacgactaaaagatcttcttggtcgattgtttttcggttcaattcggttacctgagcggaatcttcaacacaatatcatccttggtgagcttctctgctatttagaaaatcgtttatggcaagacaagggattaatcgccaacctcaaaatgaacgcgttagaggcgactgtaatgttaaattgtagcctcgatcagattgcatcaatggttgaacaacgcatcttgaagccaaatcgaaaaagcaagcccaacagccctcttgatgttaccgattatctatttcatttcggcgatattttctgtctttggttagctgagttccaaagcgatgagtttaaccgttcgttttatgtgtcgaggtggtaaatgcaaactctgaaagaactaatcgcatccaatcctgacgacttaacaactgaacttaagagagcatttcgtccactcacaccgcatattgcaattgatggtaatgaacttgacgcactgacgatattagtcaatttaaccgataagactgatgatcagaaagacctgctcgatcgagccaaatgcaagcaaaaacttcgagatgaaaaatggtgggctagctgcataaattgcgttaattacagacaaagccataacccaaaattcccggatatacgttctgaaggcgtgattcgaacccaagccctgggtgaattaccgagtttcctactctcgtcctcaaaaatcccaccataccattggtcatatagccatgattcaaaatacgtcaacaaaagcgcattcctcaccaatgagttttgttgggatggtgagatctcatgtttgggtgagcttcttaaagatgcagatcacccactttggaatactttgaaaaagttaggttgttctcaaaaaacttgcaaagcaatggcaaaacaactagctgatattactctcacgactatcaatgtcacactcgcaccaaattacctgactcaaatatctctccccgatagtgatacatcctacatttcactctctcctgttgcatcgctatcgatgcaaagccactttcatcagaggctccaagatgaaaatcggcatagcgcgataacgcggtttagccgaactaccaacatgggggtcactgcgatgacatgtggcggcgcatttagaatgttaaagtctggcgctaagttttccagcccccctcatcaccgattaaacagtaaacgaagttggttgacgtcagagcatgttcagtcattaaaacagtaccagcgcctcaacaaaagcctcatacctgaaaactctcggattgcactccgtagaaaatacaaaatcgagcttcaaaatatggtcagatcttggtttgcaatgcaagaccatacccttgattcgaacatacttatccaacatttgaatcatgacctatcttacttaggagccacaaaacgttttgcatacgatccagcgatgaccaagctctttactgagcttttgaaacgagagttatcaaattcaatcaataatggtgagcaacacactaatggatcgtttttagtcctaccgaatatcagggtttgtggcgcaacagctttaagctccccggtaacggtggggattccatcacttacagctttctttggcttcgttcacgcatttgaacggaatataaatcgcaccacctcatcgtttcgtgttgaatcctttgcgatatgcgtccatcaactacatgtcgagaagcgaggtttgacagcagagtttgtggaaaaaggcgacgggactatatccgctcccgcgacccgggatgactggcagtgtgatgtcgtatttagccttattttgaacaccaactttgctcaacatattgaccaagatacgttagttacatcactaccaaagcgattggctcggggttcagcaaaaattgcgattgatgactttaaacatatcaactcattctcgacattagaaacagcgatcgaatctctgccaatagaagctggtaggtggttatcactttacgcacagtcaaacaataatctaagtgatctattagcagccatgacagaggaccatcagctcatggcaagctgcgtcggttaccacttgttagaagagcccaaagataaaccaaactccctcagaggttacaaacacgctatcgccgagtgcatcattggactcattaactcaatcacctttagctcagagactgatcccaacacaatcttttggtcgctaaagaactatcaaaactacctagtggtacagccaaggagtatcaacgatgaaactaccgacaaatctagcctatgagcgctctatcgacccatcagatgtctgtttttttgtcgtctggcccgatgatagaaaaacacctttaacctacaattctcgtactctgctcgggcaaatggaagcggcatcattagcctatgatgtctcaggtcaaccaataaaaagtgccaccgctgaggcgttagctcaagggaaccctcatcaagttgatttctgccacgttccatacggtgcgagtcatattgaatgcagtttctccgtctcgttttcttctgaactacgtcaaccatataagtgtaactcaagcaaagttaaacaaacgctagtgcaattagtcgagctctacgaaacgaaaatcggctggactgagctagcaacccgatatttgatgaacatttgcaacggtaaatggctgtggaaaaatacccgtaaagcctattgctggaacattgtacttacaccttggccttggaacggggaaaaggttggatttgaagatattcgtactaactacacctcacggcaagactttaaaaataataaaaattggtctgctatagttgaaatgatcaaaaccgcattttctagtactgatgggctggcgatatttgaagtcagggccaccttgcacttgccaacgaatgctatggtgcggccaagccaagttttcacagaaaaagaaagtggcagtaaaagtaaatctaaaactcaaaacagtcgagtttttcagagtacaactattgatggtgaacgatcgccaatactaggggcctttaaaacgggagcagctattgcaaccattgacgactggtatcctgaagccactgagccactaagggtcggacggtttggggttcatcgcgaagatgtcacttgctaccgtcatccgtctaccggaaaagattttttctcgatattacaacaagcagagcactatattgaagtgttgagcgccaacaaaactcccgctcaagaaactatcaacgacatgcactttttaatggctaacctgattaagggtgggatgttccagcataaaggagactgactgtgaaatggtattataagacaatcacctttctgccagagttgtgcaacaacgagtcactggctgcaaagtgtctccgcgttctgcatggatttaactatcagtatgagacacgaaatatcggcgtttcatttccgctttggtgtgatgcaacggttggaaaaaagatttcatttgtcagcaagaacaagatagaactcgacttactacttaaacaacactatttcgtccaaatggaacaacttcaatactttcatatatccaacactgttctcgtcccagaagattgtacatacgtttcctttagacgctgtcaatctatagataagctcacagcagcagggctggcaaggaaaatcagacgcctggagaaacgtgctctatctagaggcgagcaatttgacccatcatcttttgctcaaaaagagcatactgcaatagcgcactaccactcacttggggagtccagcaaacagacgaaccgcaactttcgactcaatatcaggatgctctcggagcaaccccgtgaggggaactcgatttttagtagctatggcttatcaaattcagaaaactcgtttcagcctgtacccttaatctgacctttaataaggagatataccatggcgacaagtttacctacgccctcagcaattacgacttcggcgttagagtatgcattccatactcccgctcgcaatctaacgaaatctcgcggaaaaaacattcatcgttatgtcagtgtaaagatgagtaagaggattacggtagaatctactctagagtgtgatgcctgctatcactttgattttgagccaagtattgttcgcttttgcgctcaaccgattcgatttttatattatctcaatggtcagtctcactcctatgttcctgactttctagttcaatttgataccaacgagtttgttctatatgaagtaaagtcagcttatgctaagaacaaacctgattttgatgttgaatgggaggcgaaagtaaaagcagcaactgaactagggctagaattggagcttgttgaagagagtgatattagggatacggttgtattaaataatcttaagcgcatgcatcgttatgcttcgaaagatgagctgaataacgtacataactctctcttaaaaataataaagtacaatggcgcccaatctgcaagatgcttgggagaacagttgggtttaaaaggccgaactgttttaccaattttgtgcgatttgctgtcaaggtgtttactcgatacacgtttggataagcctctatctcttgaatctcgatttgagttggccagttatggctaagaaagggttctcaagtttccatagaaaagcagtctcttcccaagatacgcttgaatcgatagagcttgtctctagcgctaattgtctagaaagtgttacgtatcaagatatatcagcatttcccgaaacaattgcggtagagattaatttccgattaagcattcttcgctttttagcgcgaaagtgcgaaaccattgtggccaaatcaattgaaccacatcgtgtagagctacagcaaaactatagtagaaaaatacccagtgcaataacgatatatcgatggtggcttgcttttcgaaaatcagactacaaccccattagcttagcacctaatatcaaggatagaggtaatagagagacaaaagtgtcaacagttgttgattctattatggaacaggcagttgaaagagttatatctggacgaaaagtcaatgttagctctgcatataaacgtgttcgacgaaaagttcgtcaatacaatctaactcatggaacgaaatacacgtatcctaagtacgaatctgtaagaaagcgagtaaaaaagaaaaccccatttgagttattagccgcagggaaaggggagagagtagctaagagagagtttcgccgaatgggaaaaaagatcctcacgtctagcgtgctagagagggttgaaatagatcacactgtcgttgacctttttgcagtacacgaagagtatcgaatcccattgggccgaccttggcttactcaattggttgattgttacagtaaagctgtaatcggtttttatttaggtttcgagcctcctagctatgtgtcggtttcccttgcacttaagaatgcaatacaacgcaaagatgacttaatctcctcgtatgaatcgatcgagaatgaatggctatgttatggcatcccagacctactcgtaactgataatggtaaagagtttttgtcgaaagcatttgatcaagcatgtgaatcactattgatcaatgtgcatcaaaataaagttgagacgcccgacaacaaacctcatgttgaacgtaactacgggactattaatacttctctgttagacgatttacctgggaaatccttcagccagtaccttcaaagagaagggtacgactctgtgggagaagctacccttacactcaatgagattagagaaatttacttaatttggttggtggatatttatcataaaaaacccaatcagagaggcactaattgtcctaatgttgcgtggaaaaagggttgtcaagaatgggaaccagaggagttctctggttctaaagacgaattagactttaaatttgctattgttgattacaaacaacttactaaagtagggataactgtctacaaagaactgagttatagcaatgaccgtttagctgaatatagagggaagaaaggaaaccataaagttcagttcaagtataaccctgagtgtatggcagttatttgggtgttggatgaggatatgaatgagtactttacagttaatgcgattgactacgaatatgcaagtagagtatcactttggcaacataaatataacatgaaatatcaagcagaactaaattcagcagaatatgatgaggacaaggaaattgatgcagaaataaaaattgaagaaatcgcagatcgttcaattgttaagactaacaaaatcagagctcggaggcgtggcgctaggcatcaagagaatagcgcaagggctaagtcaatcagtaatgcgaacccggcctcgatacaaaaacatgaagatgaaatcgttagtgcagataatgacgattgggatattgattatgtctgagaaatcgtcaaatgagtgaaacgcgtgaggctcgtatatcaagagctaaaagggcatttgtatccacaccgagcgttaggaaaatcttgagttacatggatagatgtagagatctatcagacctagagtctgagcctacatgcatgatggtctatggtgcttcgggtgtaggtaaaacgaccgtcatcaagaaatacttaaatcaaaacagaagagagtccgaagccgggggcgatataataccggttttgcatattgagttgccagacaatgcgaagccagtagatgcagcaagggaattgctggttgaaatgggtgacccgctagcactttatgaaactgacttagctagattgacgaaaagactgactgaattaatccctgcggtcggcgtgaagctgattattatcgatgagttccaacatttggtggaagaaaggtcaaatcgggttcttacccaagtaggtaattggctaaaaatgatacttaacaaaacgaaatgtccaattgttatatttggtatgccatactcaaaagttgtactgcaagcaaactcgcaacttcacgggcgattttccattcaggttgaactgcgcccctttagctaccagggaggtagaggtgtatttaaaacttttttggaataccttgataaagccctaccttttgaaaaacaggctggcttagccaacgaaagtttgcagaaaaaattgtatgcattctctcagggaaacatgcgttcgttgagaaaccttatttatcaagcatctatcgaagcaattgataatcagcatgagacgataaccgaagaagatttcgtttttgcatcgaagttgacatcgggcgataaacccaactcatggaaaaatccttttgaggagggtgttgaggtaacagaagatatgttacgaccgccaccaaaagatattggttgggaggactatttgagacattcaaccccgagagtgagtaaaccaggtagaaataaaaactttttcgaataacctaggctgctgcgctgctgccaccgctgagcaataactagcataaccccttggggcctctaaacgggtcttgaggggttttttgctgaaacctcaggcatttgagaagcacacggtcacactgcttccggtagtcaataaaccggtaaaccagcaatagacataagcggctatttaacgaccctgccctgaaccgacgaccgggtcatcgtggccggatcttgcggcccctcggcttgaacgaattgttagacattatttgccgactaccttggtgatctcgcctttcacgtagtggacaaattcttccaactgatctgcgcgcgaggccaagcgatcttcttcttgtccaagataagcctgtctagcttcaagtatgacgggctgatactgggccggcaggcgctccattgcccagtcggcagcgacatccttcggcgcgattttgccggttactgcgctgtaccaaatgcgggacaacgtaagcactacatttcgctcatcgccagcccagtcgggcggcgagttccatagcgttaaggtttcatttagcgcctcaaatagatcctgttcaggaaccggatcaaagagttcctccgccgctggacctaccaaggcaacgctatgttctcttgcttttgtcagcaagatagccagatcaatgtcgatcgtggctggctcgaagatacctgcaagaatgtcattgcgctgccattctccaaattgcagttcgcgcttagctggataacgccacggaatgatgtcgtcgtgcacaacaatggtgacttctacagcgcggagaatctcgctctctccaggggaagccgaagtttccaaaaggtcgttgatcaaagctcgccgcgttgtttcatcaagccttacggtcaccgtaaccagcaaatcaatatcactgtgtggcttcaggccgccatccactgcggagccgtacaaatgtacggccagcaacgtcggttcgagatggcgctcgatgacgccaactacctctgatagttgagtcgatacttcggcgatcaccgcttccctcatactcttcctttttcaatattattgaagcatttatcagggttattgtctcatgagcggatacatatttgaatgtatttagaaaaataaacaaatagctagctcactcggtcgctacgctccgggcgtgagactgcggcgggcgctgcggacacatacaaagttacccacagattccgtggataagcaggggactaacatgtgaggcaaaacagcagggccgcgccggtggcgtttttccataggctccgccctcctgccagagttcacataaacagacgcttttccggtgcatctgtgggagccgtgaggctcaaccatgaatctgacagtacgggcgaaacccgacaggacttaaagatccccaccgtttccggcgggtcgctccctcttgcgctctcctgttccgaccctgccgtttaccggatacctgttccgcctttctcccttacgggaagtgtggcgctttctcatagctcacacactggtatctcggctcggtgtaggtcgttcgctccaagctgggctgtaagcaagaactccccgttcagcccgactgctgcgccttatccggtaactgttcacttgagtccaacccggaaaagcacggtaaaacgccactggcagcagccattggtaactgggagttcgcagaggatttgtttagctaaacacgcggttgctcttgaagtgtgcgccaaagtccggctacactggaaggacagatttggttgctgtgctctgcgaaagccagttaccacggttaagcagttccccaactgacttaaccttcgatcaaaccacctccccaggtggttttttcgtttacagggcaaaagattacgcgcagaaaaaaaggatctcaagaagatcctttgatcttttctactgaaccgctctagatttcagtgcaatttatctcttcaaatgtagcacctgaagtcagccccatacgatataagttgtaattctcatgttagtcatgccccgcgcccaccggaaggagctgactgggttgaaggctctcaagggcatcggtcgagatcccggtgcctaatgagtgagctaacttacattaattgcgttgcgctcactgcccgctttccagtcgggaaacctgtcgtgccagctgcattaatgaatcggccaacgcgcggggagaggcggtttgcgtattgggcgccagggtggtttttcttttcaccagtgagacgggcaacagctgattgcccttcaccgcctggccctgagagagttgcagcaagcggtccacgctggtttgccccagcaggcgaaaatcctgtttgatggtggttaacggcgggatataacatgagctgtcttcggtatcgtcgtatcccactaccgagatgtccgcaccaacgcgcagcccggactcggtaatggcgcgcattgcgcccagcgccatctgatcgttggcaaccagcatcgcagtgggaacgatgccctcattcagcatttgcatggtttgttgaaaaccggacatggcactccagtcgccttcccgttccgctatcggctgaatttgattgcgagtgagatatttatgccagccagccagacgcagacgcgccgagacagaacttaatgggcccgctaacagcgcgatttgctggtgacccaatgcgaccagatgctccacgcccagtcgcgtaccgtcttcatgggagaaaataatactgttgatgggtgtctggtcagagacatcaagaaataacgccggaacattagtgcaggcagcttccacagcaatggcatcctggtcatccagcggatagttaatgatcagcccactgacgcgttgcgcgagaagattgtgcaccgccgctttacaggcttcgacgccgcttcgttctaccatcgacaccaccacgctggcacccagttgatcggcgcgagatttaatcgccgcgacaatttgcgacggcgcgtgcagggccagactggaggtggcaacgccaatcagcaacgactgtttgcccgccagttgttgtgccacgcggttgggaatgtaattcagctccgccatcgccgcttccactttttcccgcgttttcgcagaaacgtggctggcctggttcaccacgcgggaaacggtctgataagagacaccggcatactctgcgacatcgtataacgttactggtttcac

SEQ ID NO: 47 - DNA, 11812 bp, artificial sequence
  Synthetic
attcaccaccctgaattgactctcttccgggcgctatcatgccataccgcgaaaggttttgcgccattcgatggtgtccgggatctcgacgctctcccttatgcgactcctgcattaggaaattaatacgactcactataggggaattgtgagcggataacaattcccctgtagaaataattttgtttaactttaataaggagatataccatgggtgaactgccgagtaggtagctgataaccgtaggtagtcacgcaactcgccgcacatctggtgaactgccgagtaggtagctgataacggatccgaattcgagcgaaggagatatacatatgtttttgcaaagacctaaaccttacagcgatgaaagtttagaaagtttctttatccgagtggctaacaaaaatggctacggtgatgtccatcgcttcctagaagccactaaacgattccttcaagacattgaccataatggctatcaaacctttccgactgatataactcggataaacccatactcagctaaaaacagttccagcgcacgaactgcgtcattcctgaaacttgcacaattgacatttaatgaaccgccagagctacttgggttggcaattaacagaacaaacatgaaatactcgccgtcaactagcgcggttgttagaggtgcagaagtctttcctcgcagtttactacggacgcactccatcccctgctgtcctttgtgtctgcgagaaaatggctacgcctcctacctttggcactttcaggggtacgaatactgccacagccataacgtacctttaattaccacttgtagctgtggtaaggagtttgactaccgagtatctgggttaaagggcatttgctgcaaatgcaaggagcctatcaccttaaccagcagggagaacggtcatgaggcagcgtgtactgtttcaaactggcttgctggccatgaatctaaacctctgccaaatcttcctaaaagctaccgatggggtttagttcattggtggatgggtattaaagatagcgagttcgatcacttttcgttcgttcaatttttctcaaactggccaaggtcattccactcgataatcgaagatgaagtagagttcaaccttgagcatgctgttgtcagcacgtctgaattacgactaaaagatcttcttggtcgattgtttttcggttcaattcggttacctgagcggaatcttcaacacaatatcatccttggtgagcttctctgctatttagaaaatcgtttatggcaagacaagggattaatcgccaacctcaaaatgaacgcgttagaggcgactgtaatgttaaattgtagcctcgatcagattgcatcaatggttgaacaacgcatcttgaagccaaatcgaaaaagcaagcccaacagccctcttgatgttaccgattatctatttcatttcggcgatattttctgtctttggttagctgagttccaaagcgatgagtttaaccgttcgttttatgtgtcgaggtggtaaatgcaaactctgaaagaactaatcgcatccaatcctgacgacttaacaactgaacttaagagagcatttcgtccactcacaccgcatattgcaattgatggtaatgaacttgacgcactgacgatattagtcaatttaaccgataagactgatgatcagaaagacctgctcgatcgagccaaatgcaagcaaaaacttcgagatgaaaaatggtgggctagctgcataaattgcgttaattacagacaaagccataacccaaaattcccggatatacgttctgaaggcgtgattcgaacccaagccctgggtgaattaccgagtttcctactctcgtcctcaaaaatcccaccataccattggtcatatagccatgattcaaaatacgtcaacaaaagcgcattcctcaccaatgagttttgttgggatggtgagatctcatgtttgggtgagcttcttaaagatgcagatcacccactttggaatactttgaaaaagttaggttgttctcaaaaaacttgcaaagcaatggcaaaacaactagctgatattactctcacgactatcaatgtcacactcgcaccaaattacctgactcaaatatctctccccgatagtgatacatcctacatttcactctctcctgttgcatcgctatcgatgcaaagccactttcatcagaggctccaagatgaaaatcggcatagcgcgataacgcggtttagccgaactaccaacatgggggtcactgcgatgacatgtggcggcgcatttagaatgttaaagtctggcgctaagttttccagcccccctcatcaccgattaaacagtaaacgaagttggttgacgtcagagcatgttcagtcattaaaacagtaccagcgcctcaacaaaagcctcatacctgaaaactctcggattgcactccgtagaaaatacaaaatcgagcttcaaaatatggtcagatcttggtttgcaatgcaagaccatacccttgattcgaacatacttatccaacatttgaatcatgacctatcttacttaggagccacaaaacgttttgcatacgatccagcgatgaccaagctctttactgagcttttgaaacgagagttatcaaattcaatcaataatggtgagcaacacactaatggatcgtttttagtcctaccgaatatcagggtttgtggcgcaacagctttaagctccccggtaacggtggggattccatcacttacagctttctttggcttcgttcacgcatttgaacggaatataaatcgcaccacctcatcgtttcgtgttgaatcctttgcgatatgcgtccatcaactacatgtcgagaagcgaggtttgacagcagagtttgtggaaaaaggcgacgggactatatccgctcccgcgacccgggatgactggcagtgtgatgtcgtatttagccttattttgaacaccaactttgctcaacatattgaccaagatacgttagttacatcactaccaaagcgattggctcggggttcagcaaaaattgcgattgatgactttaaacatatcaactcattctcgacattagaaacagcgatcgaatctctgccaatagaagctggtaggtggttatcactttacgcacagtcaaacaataatctaagtgatctattagcagccatgacagaggaccatcagctcatggcaagctgcgtcggttaccacttgttagaagagcccaaagataaaccaaactccctcagaggttacaaacacgctatcgccgagtgcatcattggactcattaactcaatcacctttagctcagagactgatcccaacacaatcttttggtcgctaaagaactatcaaaactacctagtggtacagccaaggagtatcaacgatgaaactaccgacaaatctagcctatgagcgctctatcgacccatcagatgtctgtttttttgtcgtctggcccgatgatagaaaaacacctttaacctacaattctcgtactctgctcgggcaaatggaagcggcatcattagcctatgatgtctcaggtcaaccaataaaaagtgccaccgctgaggcgttagctcaagggaaccctcatcaagttgatttctgccacgttccatacggtgcgagtcatattgaatgcagtttctccgtctcgttttcttctgaactacgtcaaccatataagtgtaactcaagcaaagttaaacaaacgctagtgcaattagtcgagctctacgaaacgaaaatcggctggactgagctagcaacccgatatttgatgaacatttgcaacggtaaatggctgtggaaaaatacccgtaaagcctattgctggaacattgtacttacaccttggccttggaacggggaaaaggttggatttgaagatattcgtactaactacacctcacggcaagactttaaaaataataaaaattggtctgctatagttgaaatgatcaaaaccgcattttctagtactgatgggctggcgatatttgaagtcagggccaccttgcacttgccaacgaatgctatggtgcggccaagccaagttttcacagaaaaagaaagtggcagtaaaagtaaatctaaaactcaaaacagtcgagtttttcagagtacaactattgatggtgaacgatcgccaatactaggggcctttaaaacgggagcagctattgcaaccattgacgactggtatcctgaagccactgagccactaagggtcggacggtttggggttcatcgcgaagatgtcacttgctaccgtcatccgtctaccggaaaagattttttctcgatattacaacaagcagagcactatattgaagtgttgagcgccaacaaaactcccgctcaagaaactatcaacgacatgcactttttaatggctaacctgattaagggtgggatgttccagcataaaggagactgactgtgaaatggtattataagacaatcacctttctgccagagttgtgcaacaacgagtcactggctgcaaagtgtctccgcgttctgcatggatttaactatcagtatgagacacgaaatatcggcgtttcatttccgctttggtgtgatgcaacggttggaaaaaagatttcatttgtcagcaagaacaagatagaactcgacttactacttaaacaacactatttcgtccaaatggaacaacttcaatactttcatatatccaacactgttctcgtcccagaagattgtacatacgtttcctttagacgctgtcaatctatagataagctcacagcagcagggctggcaaggaaaatcagacgcctggagaaacgtgctctatctagaggcgagcaatttgacccatcatcttttgctcaaaaagagcatactgcaatagcgcactaccactcacttggggagtccagcaaacagacgaaccgcaactttcgactcaatatcaggatgctctcggagcaaccccgtgaggggaactcgatttttagtagctatggcttatcaaattcagaaaactcgtttcagcctgtacccttaatctgacctttaataaggagatataccatggcgacaagtttacctacgccctcagcaattacgacttcggcgttagagtatgcattccatactcccgctcgcaatctaacgaaatctcgcggaaaaaacattcatcgttatgtcagtgtaaagatgagtaagaggattacggtagaatctactctagagtgtgatgcctgctatcactttgattttgagccaagtattgttcgcttttgcgctcaaccgattcgatttttatattatctcaatggtcagtctcactcctatgttcctgactttctagttcaatttgataccaacgagtttgttctatatgaagtaaagtcagcttatgctaagaacaaacctgattttgatgttgaatgggaggcgaaagtaaaagcagcaactgaactagggctagaattggagcttgttgaagagagtgatattagggatacggttgtattaaataatcttaagcgcatgcatcgttatgcttcgaaagatgagctgaataacgtacataactctctcttaaaaataataaagtacaatggcgcccaatctgcaagatgcttgggagaacagttgggtttaaaaggccgaactgttttaccaattttgtgcgatttgctgtcaaggtgtttactcgatacacgtttggataagcctctatctcttgaatctcgatttgagttggccagttatggctaagaaagggttctcaagtttccatagaaaagcagtctcttcccaagatacgcttgaatcgatagagcttgtctctagcgctaattgtctagaaagtgttacgtatcaagatatatcagcatttcccgaaacaattgcggtagagattaatttccgattaagcattcttcgctttttagcgcgaaagtgcgaaaccattgtggccaaatcaattgaaccacatcgtgtagagctacagcaaaactatagtagaaaaatacccagtgcaataacgatatatcgatggtggcttgcttttcgaaaatcagactacaaccccattagcttagcacctaatatcaaggatagaggtaatagagagacaaaagtgtcaacagttgttgattctattatggaacaggcagttgaaagagttatatctggacgaaaagtcaatgttagctctgcatataaacgtgttcgacgaaaagttcgtcaatacaatctaactcatggaacgaaatacacgtatcctaagtacgaatctgtaagaaagcgagtaaaaaagaaaaccccatttgagttattagccgcagggaaaggggagagagtagctaagagagagtttcgccgaatgggaaaaaagatcctcacgtctagcgtgctagagagggttgaaatagatcacactgtcgttgacctttttgcagtacacgaagagtatcgaatcccattgggccgaccttggcttactcaattggttgattgttacagtaaagctgtaatcggtttttatttaggtttcgagcctcctagctatgtgtcggtttcccttgcacttaagaatgcaatacaacgcaaagatgacttaatctcctcgtatgaatcgatcgagaatgaatggctatgttatggcatcccagacctactcgtaactgataatggtaaagagtttttgtcgaaagcatttgatcaagcatgtgaatcactattgatcaatgtgcatcaaaataaagttgagacgcccgacaacaaacctcatgttgaacgtaactacgggactattaatacttctctgttagacgatttacctgggaaatccttcagccagtaccttcaaagagaagggtacgactctgtgggagaagctacccttacactcaatgagattagagaaatttacttaatttggttggtggatatttatcataaaaaacccaatcagagaggcactaattgtcctaatgttgcgtggaaaaagggttgtcaagaatgggaaccagaggagttctctggttctaaagacgaattagactttaaatttgctattgttgattacaaacaacttactaaagtagggataactgtctacaaagaactgagttatagcaatgaccgtttagctgaatatagagggaagaaaggaaaccataaagttcagttcaagtataaccctgagtgtatggcagttatttgggtgttggatgaggatatgaatgagtactttacagttaatgcgattgactacgaatatgcaagtagagtatcactttggcaacataaatataacatgaaatatcaagcagaactaaattcagcagaatatgatgaggacaaggaaattgatgcagaaataaaaattgaagaaatcgcagatcgttcaattgttaagactaacaaaatcagagctcggaggcgtggcgctaggcatcaagagaatagcgcaagggctaagtcaatcagtaatgcgaacccggcctcgatacaaaaacatgaagatgaaatcgttagtgcagataatgacgattgggatattgattatgtctgagaaatcgtcaaatgagtgaaacgcgtgaggctcgtatatcaagagctaaaagggcatttgtatccacaccgagcgttaggaaaatcttgagttacatggatagatgtagagatctatcagacctagagtctgagcctacatgcatgatggtctatggtgcttcgggtgtaggtaaaacgaccgtcatcaagaaatacttaaatcaaaacagaagagagtccgaagccgggggcgatataataccggttttgcatattgagttgccagacaatgcgaagccagtagatgcagcaagggaattgctggttgaaatgggtgacccgctagcactttatgaaactgacttagctagattgacgaaaagactgactgaattaatccctgcggtcggcgtgaagctgattattatcgatgagttccaacatttggtggaagaaaggtcaaatcgggttcttacccaagtaggtaattggctaaaaatgatacttaacaaaacgaaatgtccaattgttatatttggtatgccatactcaaaagttgtactgcaagcaaactcgcaacttcacgggcgattttccattcaggttgaactgcgcccctttagctaccagggaggtagaggtgtatttaaaacttttttggaataccttgataaagccctaccttttgaaaaacaggctggcttagccaacgaaagtttgcagaaaaaattgtatgcattctctcagggaaacatgcgttcgttgagaaaccttatttatcaagcatctatcgaagcaattgataatcagcatgagacgataaccgaagaagatttcgtttttgcatcgaagttgacatcgggcgataaacccaactcatggaaaaatccttttgaggagggtgttgaggtaacagaagatatgttacgaccgccaccaaaagatattggttgggaggactatttgagacattcaaccccgagagtgagtaaaccaggtagaaataaaaactttttcgaataacctaggctgctgcgctgctgccaccgctgagcaataactagcataaccccttggggcctctaaacgggtcttgaggggttttttgctgaaacctcaggcatttgagaagcacacggtcacactgcttccggtagtcaataaaccggtaaaccagcaatagacataagcggctatttaacgaccctgccctgaaccgacgaccgggtcatcgtggccggatcttgcggcccctcggcttgaacgaattgttagacattatttgccgactaccttggtgatctcgcctttcacgtagtggacaaattcttccaactgatctgcgcgcgaggccaagcgatcttcttcttgtccaagataagcctgtctagcttcaagtatgacgggctgatactgggccggcaggcgctccattgcccagtcggcagcgacatccttcggcgcgattttgccggttactgcgctgtaccaaatgcgggacaacgtaagcactacatttcgctcatcgccagcccagtcgggcggcgagttccatagcgttaaggtttcatttagcgcctcaaatagatcctgttcaggaaccggatcaaagagttcctccgccgctggacctaccaaggcaacgctatgttctcttgcttttgtcagcaagatagccagatcaatgtcgatcgtggctggctcgaagatacctgcaagaatgtcattgcgctgccattctccaaattgcagttcgcgcttagctggataacgccacggaatgatgtcgtcgtgcacaacaatggtgacttctacagcgcggagaatctcgctctctccaggggaagccgaagtttccaaaaggtcgttgatcaaagctcgccgcgttgtttcatcaagccttacggtcaccgtaaccagcaaatcaatatcactgtgtggcttcaggccgccatccactgcggagccgtacaaatgtacggccagcaacgtcggttcgagatggcgctcgatgacgccaactacctctgatagttgagtcgatacttcggcgatcaccgcttccctcatactcttcctttttcaatattattgaagcatttatcagggttattgtctcatgagcggatacatatttgaatgtatttagaaaaataaacaaatagctagctcactcggtcgctacgctccgggcgtgagactgcggcgggcgctgcggacacatacaaagttacccacagattccgtggataagcaggggactaacatgtgaggcaaaacagcagggccgcgccggtggcgtttttccataggctccgccctcctgccagagttcacataaacagacgcttttccggtgcatctgtgggagccgtgaggctcaaccatgaatctgacagtacgggcgaaacccgacaggacttaaagatccccaccgtttccggcgggtcgctccctcttgcgctctcctgttccgaccctgccgtttaccggatacctgttccgcctttctcccttacgggaagtgtggcgctttctcatagctcacacactggtatctcggctcggtgtaggtcgttcgctccaagctgggctgtaagcaagaactccccgttcagcccgactgctgcgccttatccggtaactgttcacttgagtccaacccggaaaagcacggtaaaacgccactggcagcagccattggtaactgggagttcgcagaggatttgtttagctaaacacgcggttgctcttgaagtgtgcgccaaagtccggctacactggaaggacagatttggttgctgtgctctgcgaaagccagttaccacggttaagcagttccccaactgacttaaccttcgatcaaaccacctccccaggtggttttttcgtttacagggcaaaagattacgcgcagaaaaaaaggatctcaagaagatcctttgatcttttctactgaaccgctctagatttcagtgcaatttatctcttcaaatgtagcacctgaagtcagccccatacgatataagttgtaattctcatgttagtcatgccccgcgcccaccggaaggagctgactgggttgaaggctctcaagggcatcggtcgagatcccggtgcctaatgagtgagctaacttacattaattgcgttgcgctcactgcccgctttccagtcgggaaacctgtcgtgccagctgcattaatgaatcggccaacgcgcggggagaggcggtttgcgtattgggcgccagggtggtttttcttttcaccagtgagacgggcaacagctgattgcccttcaccgcctggccctgagagagttgcagcaagcggtccacgctggtttgccccagcaggcgaaaatcctgtttgatggtggttaacggcgggatataacatgagctgtcttcggtatcgtcgtatcccactaccgagatgtccgcaccaacgcgcagcccggactcggtaatggcgcgcattgcgcccagcgccatctgatcgttggcaaccagcatcgcagtgggaacgatgccctcattcagcatttgcatggtttgttgaaaaccggacatggcactccagtcgccttcccgttccgctatcggctgaatttgattgcgagtgagatatttatgccagccagccagacgcagacgcgccgagacagaacttaatgggcccgctaacagcgcgatttgctggtgacccaatgcgaccagatgctccacgcccagtcgcgtaccgtcttcatgggagaaaataatactgttgatgggtgtctggtcagagacatcaagaaataacgccggaacattagtgcaggcagcttccacagcaatggcatcctggtcatccagcggatagttaatgatcagcccactgacgcgttgcgcgagaagattgtgcaccgccgctttacaggcttcgacgccgcttcgttctaccatcgacaccaccacgctggcacccagttgatcggcgcgagatttaatcgccgcgacaatttgcgacggcgcgtgcagggccagactggaggtggcaacgccaatcagcaacgactgtttgcccgccagttgttgtgccacgcggttgggaatgtaattcagctccgccatcgccgcttccactttttcccgcgttttcgcagaaacgtggctggcctggttcaccacgcgggaaacggtctgataagagacaccggcatactctgcgacatcgtataacgttactggtttcac

SEQ ID NO: 48 - DNA, 11812 bp, artificial sequence
  Synthetic
attcaccaccctgaattgactctcttccgggcgctatcatgccataccgcgaaaggttttgcgccattcgatggtgtccgggatctcgacgctctcccttatgcgactcctgcattaggaaattaatacgactcactataggggaattgtgagcggataacaattcccctgtagaaataattttgtttaactttaataaggagatataccatgggtgaactgccgagtaggtagctgataacgaaaggcgcggtgccgctggcgacctgcgtttgtgaactgccgagtaggtagctgataacggatccgaattcgagcgaaggagatatacatatgtttttgcaaagacctaaaccttacagcgatgaaagtttagaaagtttctttatccgagtggctaacaaaaatggctacggtgatgtccatcgcttcctagaagccactaaacgattccttcaagacattgaccataatggctatcaaacctttccgactgatataactcggataaacccatactcagctaaaaacagttccagcgcacgaactgcgtcattcctgaaacttgcacaattgacatttaatgaaccgccagagctacttgggttggcaattaacagaacaaacatgaaatactcgccgtcaactagcgcggttgttagaggtgcagaagtctttcctcgcagtttactacggacgcactccatcccctgctgtcctttgtgtctgcgagaaaatggctacgcctcctacctttggcactttcaggggtacgaatactgccacagccataacgtacctttaattaccacttgtagctgtggtaaggagtttgactaccgagtatctgggttaaagggcatttgctgcaaatgcaaggagcctatcaccttaaccagcagggagaacggtcatgaggcagcgtgtactgtttcaaactggcttgctggccatgaatctaaacctctgccaaatcttcctaaaagctaccgatggggtttagttcattggtggatgggtattaaagatagcgagttcgatcacttttcgttcgttcaatttttctcaaactggccaaggtcattccactcgataatcgaagatgaagtagagttcaaccttgagcatgctgttgtcagcacgtctgaattacgactaaaagatcttcttggtcgattgtttttcggttcaattcggttacctgagcggaatcttcaacacaatatcatccttggtgagcttctctgctatttagaaaatcgtttatggcaagacaagggattaatcgccaacctcaaaatgaacgcgttagaggcgactgtaatgttaaattgtagcctcgatcagattgcatcaatggttgaacaacgcatcttgaagccaaatcgaaaaagcaagcccaacagccctcttgatgttaccgattatctatttcatttcggcgatattttctgtctttggttagctgagttccaaagcgatgagtttaaccgttcgttttatgtgtcgaggtggtaaatgcaaactctgaaagaactaatcgcatccaatcctgacgacttaacaactgaacttaagagagcatttcgtccactcacaccgcatattgcaattgatggtaatgaacttgacgcactgacgatattagtcaatttaaccgataagactgatgatcagaaagacctgctcgatcgagccaaatgcaagcaaaaacttcgagatgaaaaatggtgggctagctgcataaattgcgttaattacagacaaagccataacccaaaattcccggatatacgttctgaaggcgtgattcgaacccaagccctgggtgaattaccgagtttcctactctcgtcctcaaaaatcccaccataccattggtcatatagccatgattcaaaatacgtcaacaaaagcgcattcctcaccaatgagttttgttgggatggtgagatctcatgtttgggtgagcttcttaaagatgcagatcacccactttggaatactttgaaaaagttaggttgttctcaaaaaacttgcaaagcaatggcaaaacaactagctgatattactctcacgactatcaatgtcacactcgcaccaaattacctgactcaaatatctctccccgatagtgatacatcctacatttcactctctcctgttgcatcgctatcgatgcaaagccactttcatcagaggctccaagatgaaaatcggcatagcgcgataacgcggtttagccgaactaccaacatgggggtcactgcgatgacatgtggcggcgcatttagaatgttaaagtctggcgctaagttttccagcccccctcatcaccgattaaacagtaaacgaagttggttgacgtcagagcatgttcagtcattaaaacagtaccagcgcctcaacaaaagcctcatacctgaaaactctcggattgcactccgtagaaaatacaaaatcgagcttcaaaatatggtcagatcttggtttgcaatgcaagaccatacccttgattcgaacatacttatccaacatttgaatcatgacctatcttacttaggagccacaaaacgttttgcatacgatccagcgatgaccaagctctttactgagcttttgaaacgagagttatcaaattcaatcaataatggtgagcaacacactaatggatcgtttttagtcctaccgaatatcagggtttgtggcgcaacagctttaagctccccggtaacggtggggattccatcacttacagctttctttggcttcgttcacgcatttgaacggaatataaatcgcaccacctcatcgtttcgtgttgaatcctttgcgatatgcgtccatcaactacatgtcgagaagcgaggtttgacagcagagtttgtggaaaaaggcgacgggactatatccgctcccgcgacccgggatgactggcagtgtgatgtcgtatttagccttattttgaacaccaactttgctcaacatattgaccaagatacgttagttacatcactaccaaagcgattggctcggggttcagcaaaaattgcgattgatgactttaaacatatcaactcattctcgacattagaaacagcgatcgaatctctgccaatagaagctggtaggtggttatcactttacgcacagtcaaacaataatctaagtgatctattagcagccatgacagaggaccatcagctcatggcaagctgcgtcggttaccacttgttagaagagcccaaagataaaccaaactccctcagaggttacaaacacgctatcgccgagtgcatcattggactcattaactcaatcacctttagctcagagactgatcccaacacaatcttttggtcgctaaagaactatcaaaactacctagtggtacagccaaggagtatcaacgatgaaactaccgacaaatctagcctatgagcgctctatcgacccatcagatgtctgtttttttgtcgtctggcccgatgatagaaaaacacctttaacctacaattctcgtactctgctcgggcaaatggaagcggcatcattagcctatgatgtctcaggtcaaccaataaaaagtgccaccgctgaggcgttagctcaagggaaccctcatcaagttgatttctgccacgttccatacggtgcgagtcatattgaatgcagtttctccgtctcgttttcttctgaactacgtcaaccatataagtgtaactcaagcaaagttaaacaaacgctagtgcaattagtcgagctctacgaaacgaaaatcggctggactgagctagcaacccgatatttgatgaacatttgcaacggtaaatggctgtggaaaaatacccgtaaagcctattgctggaacattgtacttacaccttggccttggaacggggaaaaggttggatttgaagatattcgtactaactacacctcacggcaagactttaaaaataataaaaattggtctgctatagttgaaatgatcaaaaccgcattttctagtactgatgggctggcgatatttgaagtcagggccaccttgcacttgccaacgaatgctatggtgcggccaagccaagttttcacagaaaaagaaagtggcagtaaaagtaaatctaaaactcaaaacagtcgagtttttcagagtacaactattgatggtgaacgatcgccaatactaggggcctttaaaacgggagcagctattgcaaccattgacgactggtatcctgaagccactgagccactaagggtcggacggtttggggttcatcgcgaagatgtcacttgctaccgtcatccgtctaccggaaaagattttttctcgatattacaacaagcagagcactatattgaagtgttgagcgccaacaaaactcccgctcaagaaactatcaacgacatgcactttttaatggctaacctgattaagggtgggatgttccagcataaaggagactgactgtgaaatggtattataagacaatcacctttctgccagagttgtgcaacaacgagtcactggctgcaaagtgtctccgcgttctgcatggatttaactatcagtatgagacacgaaatatcggcgtttcatttccgctttggtgtgatgcaacggttggaaaaaagatttcatttgtcagcaagaacaagatagaactcgacttactacttaaacaacactatttcgtccaaatggaacaacttcaatactttcatatatccaacactgttctcgtcccagaagattgtacatacgtttcctttagacgctgtcaatctatagataagctcacagcagcagggctggcaaggaaaatcagacgcctggagaaacgtgctctatctagaggcgagcaatttgacccatcatcttttgctcaaaaagagcatactgcaatagcgcactaccactcacttggggagtccagcaaacagacgaaccgcaactttcgactcaatatcaggatgctctcggagcaaccccgtgaggggaactcgatttttagtagctatggcttatcaaattcagaaaactcgtttcagcctgtacccttaatctgacctttaataaggagatataccatggcgacaagtttacctacgccctcagcaattacgacttcggcgttagagtatgcattccatactcccgctcgcaatctaacgaaatctcgcggaaaaaacattcatcgttatgtcagtgtaaagatgagtaagaggattacggtagaatctactctagagtgtgatgcctgctatcactttgattttgagccaagtattgttcgcttttgcgctcaaccgattcgatttttatattatctcaatggtcagtctcactcctatgttcctgactttctagttcaatttgataccaacgagtttgttctatatgaagtaaagtcagcttatgctaagaacaaacctgattttgatgttgaatgggaggcgaaagtaaaagcagcaactgaactagggctagaattggagcttgttgaagagagtgatattagggatacggttgtattaaataatcttaagcgcatgcatcgttatgcttcgaaagatgagctgaataacgtacataactctctcttaaaaataataaagtacaatggcgcccaatctgcaagatgcttgggagaacagttgggtttaaaaggccgaactgttttaccaattttgtgcgatttgctgtcaaggtgtttactcgatacacgtttggataagcctctatctcttgaatctcgatttgagttggccagttatggctaagaaagggttctcaagtttccatagaaaagcagtctcttcccaagatacgcttgaatcgatagagcttgtctctagcgctaattgtctagaaagtgttacgtatcaagatatatcagcatttcccgaaacaattgcggtagagattaatttccgattaagcattcttcgctttttagcgcgaaagtgcgaaaccattgtggccaaatcaattgaaccacatcgtgtagagctacagcaaaactatagtagaaaaatacccagtgcaataacgatatatcgatggtggcttgcttttcgaaaatcagactacaaccccattagcttagcacctaatatcaaggatagaggtaatagagagacaaaagtgtcaacagttgttgattctattatggaacaggcagttgaaagagttatatctggacgaaaagtcaatgttagctctgcatataaacgtgttcgacgaaaagttcgtcaatacaatctaactcatggaacgaaatacacgtatcctaagtacgaatctgtaagaaagcgagtaaaaaagaaaaccccatttgagttattagccgcagggaaaggggagagagtagctaagagagagtttcgccgaatgggaaaaaagatcctcacgtctagcgtgctagagagggttgaaatagatcacactgtcgttgacctttttgcagtacacgaagagtatcgaatcccattgggccgaccttggcttactcaattggttgattgttacagtaaagctgtaatcggtttttatttaggtttcgagcctcctagctatgtgtcggtttcccttgcacttaagaatgcaatacaacgcaaagatgacttaatctcctcgtatgaatcgatcgagaatgaatggctatgttatggcatcccagacctactcgtaactgataatggtaaagagtttttgtcgaaagcatttgatcaagcatgtgaatcactattgatcaatgtgcatcaaaataaagttgagacgcccgacaacaaacctcatgttgaacgtaactacgggactattaatacttctctgttagacgatttacctgggaaatccttcagccagtaccttcaaagagaagggtacgactctgtgggagaagctacccttacactcaatgagattagagaaatttacttaatttggttggtggatatttatcataaaaaacccaatcagagaggcactaattgtcctaatgttgcgtggaaaaagggttgtcaagaatgggaaccagaggagttctctggttctaaagacgaattagactttaaatttgctattgttgattacaaacaacttactaaagtagggataactgtctacaaagaactgagttatagcaatgaccgtttagctgaatatagagggaagaaaggaaaccataaagttcagttcaagtataaccctgagtgtatggcagttatttgggtgttggatgaggatatgaatgagtactttacagttaatgcgattgactacgaatatgcaagtagagtatcactttggcaacataaatataacatgaaatatcaagcagaactaaattcagcagaatatgatgaggacaaggaaattgatgcagaaataaaaattgaagaaatcgcagatcgttcaattgttaagactaacaaaatcagagctcggaggcgtggcgctaggcatcaagagaatagcgcaagggctaagtcaatcagtaatgcgaacccggcctcgatacaaaaacatgaagatgaaatcgttagtgcagataatgacgattgggatattgattatgtctgagaaatcgtcaaatgagtgaaacgcgtgaggctcgtatatcaagagctaaaagggcatttgtatccacaccgagcgttaggaaaatcttgagttacatggatagatgtagagatctatcagacctagagtctgagcctacatgcatgatggtctatggtgcttcgggtgtaggtaaaacgaccgtcatcaagaaatacttaaatcaaaacagaagagagtccgaagccgggggcgatataataccggttttgcatattgagttgccagacaatgcgaagccagtagatgcagcaagggaattgctggttgaaatgggtgacccgctagcactttatgaaactgacttagctagattgacgaaaagactgactgaattaatccctgcggtcggcgtgaagctgattattatcgatgagttccaacatttggtggaagaaaggtcaaatcgggttcttacccaagtaggtaattggctaaaaatgatacttaacaaaacgaaatgtccaattgttatatttggtatgccatactcaaaagttgtactgcaagcaaactcgcaacttcacgggcgattttccattcaggttgaactgcgcccctttagctaccagggaggtagaggtgtatttaaaacttttttggaataccttgataaagccctaccttttgaaaaacaggctggcttagccaacgaaagtttgcagaaaaaattgtatgcattctctcagggaaacatgcgttcgttgagaaaccttatttatcaagcatctatcgaagcaattgataatcagcatgagacgataaccgaagaagatttcgtttttgcatcgaagttgacatcgggcgataaacccaactcatggaaaaatccttttgaggagggtgttgaggtaacagaagatatgttacgaccgccaccaaaagatattggttgggaggactatttgagacattcaaccccgagagtgagtaaaccaggtagaaataaaaactttttcgaataacctaggctgctgcgctgctgccaccgctgagcaataactagcataaccccttggggcctctaaacgggtcttgaggggttttttgctgaaacctcaggcatttgagaagcacacggtcacactgcttccggtagtcaataaaccggtaaaccagcaatagacataagcggctatttaacgaccctgccctgaaccgacgaccgggtcatcgtggccggatcttgcggcccctcggcttgaacgaattgttagacattatttgccgactaccttggtgatctcgcctttcacgtagtggacaaattcttccaactgatctgcgcgcgaggccaagcgatcttcttcttgtccaagataagcctgtctagcttcaagtatgacgggctgatactgggccggcaggcgctccattgcccagtcggcagcgacatccttcggcgcgattttgccggttactgcgctgtaccaaatgcgggacaacgtaagcactacatttcgctcatcgccagcccagtcgggcggcgagttccatagcgttaaggtttcatttagcgcctcaaatagatcctgttcaggaaccggatcaaagagttcctccgccgctggacctaccaaggcaacgctatgttctcttgcttttgtcagcaagatagccagatcaatgtcgatcgtggctggctcgaagatacctgcaagaatgtcattgcgctgccattctccaaattgcagttcgcgcttagctggataacgccacggaatgatgtcgtcgtgcacaacaatggtgacttctacagcgcggagaatctcgctctctccaggggaagccgaagtttccaaaaggtcgttgatcaaagctcgccgcgttgtttcatcaagccttacggtcaccgtaaccagcaaatcaatatcactgtgtggcttcaggccgccatccactgcggagccgtacaaatgtacggccagcaacgtcggttcgagatggcgctcgatgacgccaactacctctgatagttgagtcgatacttcggcgatcaccgcttccctcatactcttcctttttcaatattattgaagcatttatcagggttattgtctcatgagcggatacatatttgaatgtatttagaaaaataaacaaatagctagctcactcggtcgctacgctccgggcgtgagactgcggcgggcgctgcggacacatacaaagttacccacagattccgtggataagcaggggactaacatgtgaggcaaaacagcagggccgcgccggtggcgtttttccataggctccgccctcctgccagagttcacataaacagacgcttttccggtgcatctgtgggagccgtgaggctcaaccatgaatctgacagtacgggcgaaacccgacaggacttaaagatccccaccgtttccggcgggtcgctccctcttgcgctctcctgttccgaccctgccgtttaccggatacctgttccgcctttctcccttacgggaagtgtggcgctttctcatagctcacacactggtatctcggctcggtgtaggtcgttcgctccaagctgggctgtaagcaagaactccccgttcagcccgactgctgcgccttatccggtaactgttcacttgagtccaacccggaaaagcacggtaaaacgccactggcagcagccattggtaactgggagttcgcagaggatttgtttagctaaacacgcggttgctcttgaagtgtgcgccaaagtccggctacactggaaggacagatttggttgctgtgctctgcgaaagccagttaccacggttaagcagttccccaactgacttaaccttcgatcaaaccacctccccaggtggttttttcgtttacagggcaaaagattacgcgcagaaaaaaaggatctcaagaagatcctttgatcttttctactgaaccgctctagatttcagtgcaatttatctcttcaaatgtagcacctgaagtcagccccatacgatataagttgtaattctcatgttagtcatgccccgcgcccaccggaaggagctgactgggttgaaggctctcaagggcatcggtcgagatcccggtgcctaatgagtgagctaacttacattaattgcgttgcgctcactgcccgctttccagtcgggaaacctgtcgtgccagctgcattaatgaatcggccaacgcgcggggagaggcggtttgcgtattgggcgccagggtggtttttcttttcaccagtgagacgggcaacagctgattgcccttcaccgcctggccctgagagagttgcagcaagcggtccacgctggtttgccccagcaggcgaaaatcctgtttgatggtggttaacggcgggatataacatgagctgtcttcggtatcgtcgtatcccactaccgagatgtccgcaccaacgcgcagcccggactcggtaatggcgcgcattgcgcccagcgccatctgatcgttggcaaccagcatcgcagtgggaacgatgccctcattcagcatttgcatggtttgttgaaaaccggacatggcactccagtcgccttcccgttccgctatcggctgaatttgattgcgagtgagatatttatgccagccagccagacgcagacgcgccgagacagaacttaatgggcccgctaacagcgcgatttgctggtgacccaatgcgaccagatgctccacgcccagtcgcgtaccgtcttcatgggagaaaataatactgttgatgggtgtctggtcagagacatcaagaaataacgccggaacattagtgcaggcagcttccacagcaatggcatcctggtcatccagcggatagttaatgatcagcccactgacgcgttgcgcgagaagattgtgcaccgccgctttacaggcttcgacgccgcttcgttctaccatcgacaccaccacgctggcacccagttgatcggcgcgagatttaatcgccgcgacaatttgcgacggcgcgtgcagggccagactggaggtggcaacgccaatcagcaacgactgtttgcccgccagttgttgtgccacgcggttgggaatgtaattcagctccgccatcgccgcttccactttttcccgcgttttcgcagaaacgtggctggcctggttcaccacgcgggaaacggtctgataagagacaccggcatactctgcgacatcgtataacgttactggtttcac

SEQ ID NO: 49 - DNA, 11812 bp, artificial sequence
  Synthetic
attcaccaccctgaattgactctcttccgggcgctatcatgccataccgcgaaaggttttgcgccattcgatggtgtccgggatctcgacgctctcccttatgcgactcctgcattaggaaattaatacgactcactataggggaattgtgagcggataacaattcccctgtagaaataattttgtttaactttaataaggagatataccatgggtgaactgccgagtaggtagctgataacgtcggcggtgtgcagttcaaccaccgcacgatgtgaactgccgagtaggtagctgataacggatccgaattcgagcgaaggagatatacatatgtttttgcaaagacctaaaccttacagcgatgaaagtttagaaagtttctttatccgagtggctaacaaaaatggctacggtgatgtccatcgcttcctagaagccactaaacgattccttcaagacattgaccataatggctatcaaacctttccgactgatataactcggataaacccatactcagctaaaaacagttccagcgcacgaactgcgtcattcctgaaacttgcacaattgacatttaatgaaccgccagagctacttgggttggcaattaacagaacaaacatgaaatactcgccgtcaactagcgcggttgttagaggtgcagaagtctttcctcgcagtttactacggacgcactccatcccctgctgtcctttgtgtctgcgagaaaatggctacgcctcctacctttggcactttcaggggtacgaatactgccacagccataacgtacctttaattaccacttgtagctgtggtaaggagtttgactaccgagtatctgggttaaagggcatttgctgcaaatgcaaggagcctatcaccttaaccagcagggagaacggtcatgaggcagcgtgtactgtttcaaactggcttgctggccatgaatctaaacctctgccaaatcttcctaaaagctaccgatggggtttagttcattggtggatgggtattaaagatagcgagttcgatcacttttcgttcgttcaatttttctcaaactggccaaggtcattccactcgataatcgaagatgaagtagagttcaaccttgagcatgctgttgtcagcacgtctgaattacgactaaaagatcttcttggtcgattgtttttcggttcaattcggttacctgagcggaatcttcaacacaatatcatccttggtgagcttctctgctatttagaaaatcgtttatggcaagacaagggattaatcgccaacctcaaaatgaacgcgttagaggcgactgtaatgttaaattgtagcctcgatcagattgcatcaatggttgaacaacgcatcttgaagccaaatcgaaaaagcaagcccaacagccctcttgatgttaccgattatctatttcatttcggcgatattttctgtctttggttagctgagttccaaagcgatgagtttaaccgttcgttttatgtgtcgaggtggtaaatgcaaactctgaaagaactaatcgcatccaatcctgacgacttaacaactgaacttaagagagcatttcgtccactcacaccgcatattgcaattgatggtaatgaacttgacgcactgacgatattagtcaatttaaccgataagactgatgatcagaaagacctgctcgatcgagccaaatgcaagcaaaaacttcgagatgaaaaatggtgggctagctgcataaattgcgttaattacagacaaagccataacccaaaattcccggatatacgttctgaaggcgtgattcgaacccaagccctgggtgaattaccgagtttcctactctcgtcctcaaaaatcccaccataccattggtcatatagccatgattcaaaatacgtcaacaaaagcgcattcctcaccaatgagttttgttgggatggtgagatctcatgtttgggtgagcttcttaaagatgcagatcacccactttggaatactttgaaaaagttaggttgttctcaaaaaacttgcaaagcaatggcaaaacaactagctgatattactctcacgactatcaatgtcacactcgcaccaaattacctgactcaaatatctctccccgatagtgatacatcctacatttcactctctcctgttgcatcgctatcgatgcaaagccactttcatcagaggctccaagatgaaaatcggcatagcgcgataacgcggtttagccgaactaccaacatgggggtcactgcgatgacatgtggcggcgcatttagaatgttaaagtctggcgctaagttttccagcccccctcatcaccgattaaacagtaaacgaagttggttgacgtcagagcatgttcagtcattaaaacagtaccagcgcctcaacaaaagcctcatacctgaaaactctcggattgcactccgtagaaaatacaaaatcgagcttcaaaatatggtcagatcttggtttgcaatgcaagaccatacccttgattcgaacatacttatccaacatttgaatcatgacctatcttacttaggagccacaaaacgttttgcatacgatccagcgatgaccaagctctttactgagcttttgaaacgagagttatcaaattcaatcaataatggtgagcaacacactaatggatcgtttttagtcctaccgaatatcagggtttgtggcgcaacagctttaagctccccggtaacggtggggattccatcacttacagctttctttggcttcgttcacgcatttgaacggaatataaatcgcaccacctcatcgtttcgtgttgaatcctttgcgatatgcgtccatcaactacatgtcgagaagcgaggtttgacagcagagtttgtggaaaaaggcgacgggactatatccgctcccgcgacccgggatgactggcagtgtgatgtcgtatttagccttattttgaacaccaactttgctcaacatattgaccaagatacgttagttacatcactaccaaagcgattggctcggggttcagcaaaaattgcgattgatgactttaaacatatcaactcattctcgacattagaaacagcgatcgaatctctgccaatagaagctggtaggtggttatcactttacgcacagtcaaacaataatctaagtgatctattagcagccatgacagaggaccatcagctcatggcaagctgcgtcggttaccacttgttagaagagcccaaagataaaccaaactccctcagaggttacaaacacgctatcgccgagtgcatcattggactcattaactcaatcacctttagctcagagactgatcccaacacaatcttttggtcgctaaagaactatcaaaactacctagtggtacagccaaggagtatcaacgatgaaactaccgacaaatctagcctatgagcgctctatcgacccatcagatgtctgtttttttgtcgtctggcccgatgatagaaaaacacctttaacctacaattctcgtactctgctcgggcaaatggaagcggcatcattagcctatgatgtctcaggtcaaccaataaaaagtgccaccgctgaggcgttagctcaagggaaccctcatcaagttgatttctgccacgttccatacggtgcgagtcatattgaatgcagtttctccgtctcgttttcttctgaactacgtcaaccatataagtgtaactcaagcaaagttaaacaaacgctagtgcaattagtcgagctctacgaaacgaaaatcggctggactgagctagcaacccgatatttgatgaacatttgcaacggtaaatggctgtggaaaaatacccgtaaagcctattgctggaacattgtacttacaccttggccttggaacggggaaaaggttggatttgaagatattcgtactaactacacctcacggcaagactttaaaaataataaaaattggtctgctatagttgaaatgatcaaaaccgcattttctagtactgatgggctggcgatatttgaagtcagggccaccttgcacttgccaacgaatgctatggtgcggccaagccaagttttcacagaaaaagaaagtggcagtaaaagtaaatctaaaactcaaaacagtcgagtttttcagagtacaactattgatggtgaacgatcgccaatactaggggcctttaaaacgggagcagctattgcaaccattgacgactggtatcctgaagccactgagccactaagggtcggacggtttggggttcatcgcgaagatgtcacttgctaccgtcatccgtctaccggaaaagattttttctcgatattacaacaagcagagcactatattgaagtgttgagcgccaacaaaactcccgctcaagaaactatcaacgacatgcactttttaatggctaacctgattaagggtgggatgttccagcataaaggagactgactgtgaaatggtattataagacaatcacctttctgccagagttgtgcaacaacgagtcactggctgcaaagtgtctccgcgttctgcatggatttaactatcagtatgagacacgaaatatcggcgtttcatttccgctttggtgtgatgcaacggttggaaaaaagatttcatttgtcagcaagaacaagatagaactcgacttactacttaaacaacactatttcgtccaaatggaacaacttcaatactttcatatatccaacactgttctcgtcccagaagattgtacatacgtttcctttagacgctgtcaatctatagataagctcacagcagcagggctggcaaggaaaatcagacgcctggagaaacgtgctctatctagaggcgagcaatttgacccatcatcttttgctcaaaaagagcatactgcaatagcgcactaccactcacttggggagtccagcaaacagacgaaccgcaactttcgactcaatatcaggatgctctcggagcaaccccgtgaggggaactcgatttttagtagctatggcttatcaaattcagaaaactcgtttcagcctgtacccttaatctgacctttaataaggagatataccatggcgacaagtttacctacgccctcagcaattacgacttcggcgttagagtatgcattccatactcccgctcgcaatctaacgaaatctcgcggaaaaaacattcatcgttatgtcagtgtaaagatgagtaagaggattacggtagaatctactctagagtgtgatgcctgctatcactttgattttgagccaagtattgttcgcttttgcgctcaaccgattcgatttttatattatctcaatggtcagtctcactcctatgttcctgactttctagttcaatttgataccaacgagtttgttctatatgaagtaaagtcagcttatgctaagaacaaacctgattttgatgttgaatgggaggcgaaagtaaaagcagcaactgaactagggctagaattggagcttgttgaagagagtgatattagggatacggttgtattaaataatcttaagcgcatgcatcgttatgcttcgaaagatgagctgaataacgtacataactctctcttaaaaataataaagtacaatggcgcccaatctgcaagatgcttgggagaacagttgggtttaaaaggccgaactgttttaccaattttgtgcgatttgctgtcaaggtgtttactcgatacacgtttggataagcctctatctcttgaatctcgatttgagttggccagttatggctaagaaagggttctcaagtttccatagaaaagcagtctcttcccaagatacgcttgaatcgatagagcttgtctctagcgctaattgtctagaaagtgttacgtatcaagatatatcagcatttcccgaaacaattgcggtagagattaatttccgattaagcattcttcgctttttagcgcgaaagtgcgaaaccattgtggccaaatcaattgaaccacatcgtgtagagctacagcaaaactatagtagaaaaatacccagtgcaataacgatatatcgatggtggcttgcttttcgaaaatcagactacaaccccattagcttagcacctaatatcaaggatagaggtaatagagagacaaaagtgtcaacagttgttgattctattatggaacaggcagttgaaagagttatatctggacgaaaagtcaatgttagctctgcatataaacgtgttcgacgaaaagttcgtcaatacaatctaactcatggaacgaaatacacgtatcctaagtacgaatctgtaagaaagcgagtaaaaaagaaaaccccatttgagttattagccgcagggaaaggggagagagtagctaagagagagtttcgccgaatgggaaaaaagatcctcacgtctagcgtgctagagagggttgaaatagatcacactgtcgttgacctttttgcagtacacgaagagtatcgaatcccattgggccgaccttggcttactcaattggttgattgttacagtaaagctgtaatcggtttttatttaggtttcgagcctcctagctatgtgtcggtttcccttgcacttaagaatgcaatacaacgcaaagatgacttaatctcctcgtatgaatcgatcgagaatgaatggctatgttatggcatcccagacctactcgtaactgataatggtaaagagtttttgtcgaaagcatttgatcaagcatgtgaatcactattgatcaatgtgcatcaaaataaagttgagacgcccgacaacaaacctcatgttgaacgtaactacgggactattaatacttctctgttagacgatttacctgggaaatccttcagccagtaccttcaaagagaagggtacgactctgtgggagaagctacccttacactcaatgagattagagaaatttacttaatttggttggtggatatttatcataaaaaacccaatcagagaggcactaattgtcctaatgttgcgtggaaaaagggttgtcaagaatgggaaccagaggagttctctggttctaaagacgaattagactttaaatttgctattgttgattacaaacaacttactaaagtagggataactgtctacaaagaactgagttatagcaatgaccgtttagctgaatatagagggaagaaaggaaaccataaagttcagttcaagtataaccctgagtgtatggcagttatttgggtgttggatgaggatatgaatgagtactttacagttaatgcgattgactacgaatatgcaagtagagtatcactttggcaacataaatataacatgaaatatcaagcagaactaaattcagcagaatatgatgaggacaaggaaattgatgcagaaataaaaattgaagaaatcgcagatcgttcaattgttaagactaacaaaatcagagctcggaggcgtggcgctaggcatcaagagaatagcgcaagggctaagtcaatcagtaatgcgaacccggcctcgatacaaaaacatgaagatgaaatcgttagtgcagataatgacgattgggatattgattatgtctgagaaatcgtcaaatgagtgaaacgcgtgaggctcgtatatcaagagctaaaagggcatttgtatccacaccgagcgttaggaaaatcttgagttacatggatagatgtagagatctatcagacctagagtctgagcctacatgcatgatggtctatggtgcttcgggtgtaggtaaaacgaccgtcatcaagaaatacttaaatcaaaacagaagagagtccgaagccgggggcgatataataccggttttgcatattgagttgccagacaatgcgaagccagtagatgcagcaagggaattgctggttgaaatgggtgacccgctagcactttatgaaactgacttagctagattgacgaaaagactgactgaattaatccctgcggtcggcgtgaagctgattattatcgatgagttccaacatttggtggaagaaaggtcaaatcgggttcttacccaagtaggtaattggctaaaaatgatacttaacaaaacgaaatgtccaattgttatatttggtatgccatactcaaaagttgtactgcaagcaaactcgcaacttcacgggcgattttccattcaggttgaactgcgcccctttagctaccagggaggtagaggtgtatttaaaacttttttggaataccttgataaagccctaccttttgaaaaacaggctggcttagccaacgaaagtttgcagaaaaaattgtatgcattctctcagggaaacatgcgttcgttgagaaaccttatttatcaagcatctatcgaagcaattgataatcagcatgagacgataaccgaagaagatttcgtttttgcatcgaagttgacatcgggcgataaacccaactcatggaaaaatccttttgaggagggtgttgaggtaacagaagatatgttacgaccgccaccaaaagatattggttgggaggactatttgagacattcaaccccgagagtgagtaaaccaggtagaaataaaaactttttcgaataacctaggctgctgcgctgctgccaccgctgagcaataactagcataaccccttggggcctctaaacgggtcttgaggggttttttgctgaaacctcaggcatttgagaagcacacggtcacactgcttccggtagtcaataaaccggtaaaccagcaatagacataagcggctatttaacgaccctgccctgaaccgacgaccgggtcatcgtggccggatcttgcggcccctcggcttgaacgaattgttagacattatttgccgactaccttggtgatctcgcctttcacgtagtggacaaattcttccaactgatctgcgcgcgaggccaagcgatcttcttcttgtccaagataagcctgtctagcttcaagtatgacgggctgatactgggccggcaggcgctccattgcccagtcggcagcgacatccttcggcgcgattttgccggttactgcgctgtaccaaatgcgggacaacgtaagcactacatttcgctcatcgccagcccagtcgggcggcgagttccatagcgttaaggtttcatttagcgcctcaaatagatcctgttcaggaaccggatcaaagagttcctccgccgctggacctaccaaggcaacgctatgttctcttgcttttgtcagcaagatagccagatcaatgtcgatcgtggctggctcgaagatacctgcaagaatgtcattgcgctgccattctccaaattgcagttcgcgcttagctggataacgccacggaatgatgtcgtcgtgcacaacaatggtgacttctacagcgcggagaatctcgctctctccaggggaagccgaagtttccaaaaggtcgttgatcaaagctcgccgcgttgtttcatcaagccttacggtcaccgtaaccagcaaatcaatatcactgtgtggcttcaggccgccatccactgcggagccgtacaaatgtacggccagcaacgtcggttcgagatggcgctcgatgacgccaactacctctgatagttgagtcgatacttcggcgatcaccgcttccctcatactcttcctttttcaatattattgaagcatttatcagggttattgtctcatgagcggatacatatttgaatgtatttagaaaaataaacaaatagctagctcactcggtcgctacgctccgggcgtgagactgcggcgggcgctgcggacacatacaaagttacccacagattccgtggataagcaggggactaacatgtgaggcaaaacagcagggccgcgccggtggcgtttttccataggctccgccctcctgccagagttcacataaacagacgcttttccggtgcatctgtgggagccgtgaggctcaaccatgaatctgacagtacgggcgaaacccgacaggacttaaagatccccaccgtttccggcgggtcgctccctcttgcgctctcctgttccgaccctgccgtttaccggatacctgttccgcctttctcccttacgggaagtgtggcgctttctcatagctcacacactggtatctcggctcggtgtaggtcgttcgctccaagctgggctgtaagcaagaactccccgttcagcccgactgctgcgccttatccggtaactgttcacttgagtccaacccggaaaagcacggtaaaacgccactggcagcagccattggtaactgggagttcgcagaggatttgtttagctaaacacgcggttgctcttgaagtgtgcgccaaagtccggctacactggaaggacagatttggttgctgtgctctgcgaaagccagttaccacggttaagcagttccccaactgacttaaccttcgatcaaaccacctccccaggtggttttttcgtttacagggcaaaagattacgcgcagaaaaaaaggatctcaagaagatcctttgatcttttctactgaaccgctctagatttcagtgcaatttatctcttcaaatgtagcacctgaagtcagccccatacgatataagttgtaattctcatgttagtcatgccccgcgcccaccggaaggagctgactgggttgaaggctctcaagggcatcggtcgagatcccggtgcctaatgagtgagctaacttacattaattgcgttgcgctcactgcccgctttccagtcgggaaacctgtcgtgccagctgcattaatgaatcggccaacgcgcggggagaggcggtttgcgtattgggcgccagggtggtttttcttttcaccagtgagacgggcaacagctgattgcccttcaccgcctggccctgagagagttgcagcaagcggtccacgctggtttgccccagcaggcgaaaatcctgtttgatggtggttaacggcgggatataacatgagctgtcttcggtatcgtcgtatcccactaccgagatgtccgcaccaacgcgcagcccggactcggtaatggcgcgcattgcgcccagcgccatctgatcgttggcaaccagcatcgcagtgggaacgatgccctcattcagcatttgcatggtttgttgaaaaccggacatggcactccagtcgccttcccgttccgctatcggctgaatttgattgcgagtgagatatttatgccagccagccagacgcagacgcgccgagacagaacttaatgggcccgctaacagcgcgatttgctggtgacccaatgcgaccagatgctccacgcccagtcgcgtaccgtcttcatgggagaaaataatactgttgatgggtgtctggtcagagacatcaagaaataacgccggaacattagtgcaggcagcttccacagcaatggcatcctggtcatccagcggatagttaatgatcagcccactgacgcgttgcgcgagaagattgtgcaccgccgctttacaggcttcgacgccgcttcgttctaccatcgacaccaccacgctggcacccagttgatcggcgcgagatttaatcgccgcgacaatttgcgacggcgcgtgcagggccagactggaggtggcaacgccaatcagcaacgactgtttgcccgccagttgttgtgccacgcggttgggaatgtaattcagctccgccatcgccgcttccactttttcccgcgttttcgcagaaacgtggctggcctggttcaccacgcgggaaacggtctgataagagacaccggcatactctgcgacatcgtataacgttactggtttcac

SEQ ID NO: 50 - DNA, 11812 bp, artificial sequence
  Synthetic
attcaccaccctgaattgactctcttccgggcgctatcatgccataccgcgaaaggttttgcgccattcgatggtgtccgggatctcgacgctctcccttatgcgactcctgcattaggaaattaatacgactcactataggggaattgtgagcggataacaattcccctgtagaaataattttgtttaactttaataaggagatataccatgggtgaactgccgagtaggtagctgataacacatacaggccgtagcggtcgcacagcgtgtagtgaactgccgagtaggtagctgataacggatccgaattcgagcgaaggagatatacatatgtttttgcaaagacctaaaccttacagcgatgaaagtttagaaagtttctttatccgagtggctaacaaaaatggctacggtgatgtccatcgcttcctagaagccactaaacgattccttcaagacattgaccataatggctatcaaacctttccgactgatataactcggataaacccatactcagctaaaaacagttccagcgcacgaactgcgtcattcctgaaacttgcacaattgacatttaatgaaccgccagagctacttgggttggcaattaacagaacaaacatgaaatactcgccgtcaactagcgcggttgttagaggtgcagaagtctttcctcgcagtttactacggacgcactccatcccctgctgtcctttgtgtctgcgagaaaatggctacgcctcctacctttggcactttcaggggtacgaatactgccacagccataacgtacctttaattaccacttgtagctgtggtaaggagtttgactaccgagtatctgggttaaagggcatttgctgcaaatgcaaggagcctatcaccttaaccagcagggagaacggtcatgaggcagcgtgtactgtttcaaactggcttgctggccatgaatctaaacctctgccaaatcttcctaaaagctaccgatggggtttagttcattggtggatgggtattaaagatagcgagttcgatcacttttcgttcgttcaatttttctcaaactggccaaggtcattccactcgataatcgaagatgaagtagagttcaaccttgagcatgctgttgtcagcacgtctgaattacgactaaaagatcttcttggtcgattgtttttcggttcaattcggttacctgagcggaatcttcaacacaatatcatccttggtgagcttctctgctatttagaaaatcgtttatggcaagacaagggattaatcgccaacctcaaaatgaacgcgttagaggcgactgtaatgttaaattgtagcctcgatcagattgcatcaatggttgaacaacgcatcttgaagccaaatcgaaaaagcaagcccaacagccctcttgatgttaccgattatctatttcatttcggcgatattttctgtctttggttagctgagttccaaagcgatgagtttaaccgttcgttttatgtgtcgaggtggtaaatgcaaactctgaaagaactaatcgcatccaatcctgacgacttaacaactgaacttaagagagcatttcgtccactcacaccgcatattgcaattgatggtaatgaacttgacgcactgacgatattagtcaatttaaccgataagactgatgatcagaaagacctgctcgatcgagccaaatgcaagcaaaaacttcgagatgaaaaatggtgggctagctgcataaattgcgttaattacagacaaagccataacccaaaattcccggatatacgttctgaaggcgtgattcgaacccaagccctgggtgaattaccgagtttcctactctcgtcctcaaaaatcccaccataccattggtcatatagccatgattcaaaatacgtcaacaaaagcgcattcctcaccaatgagttttgttgggatggtgagatctcatgtttgggtgagcttcttaaagatgcagatcacccactttggaatactttgaaaaagttaggttgttctcaaaaaacttgcaaagcaatggcaaaacaactagctgatattactctcacgactatcaatgtcacactcgcaccaaattacctgactcaaatatctctccccgatagtgatacatcctacatttcactctctcctgttgcatcgctatcgatgcaaagccactttcatcagaggctccaagatgaaaatcggcatagcgcgataacgcggtttagccgaactaccaacatgggggtcactgcgatgacatgtggcggcgcatttagaatgttaaagtctggcgctaagttttccagcccccctcatcaccgattaaacagtaaacgaagttggttgacgtcagagcatgttcagtcattaaaacagtaccagcgcctcaacaaaagcctcatacctgaaaactctcggattgcactccgtagaaaatacaaaatcgagcttcaaaatatggtcagatcttggtttgcaatgcaagaccatacccttgattcgaacatacttatccaacatttgaatcatgacctatcttacttaggagccacaaaacgttttgcatacgatccagcgatgaccaagctctttactgagcttttgaaacgagagttatcaaattcaatcaataatggtgagcaacacactaatggatcgtttttagtcctaccgaatatcagggtttgtggcgcaacagctttaagctccccggtaacggtggggattccatcacttacagctttctttggcttcgttcacgcatttgaacggaatataaatcgcaccacctcatcgtttcgtgttgaatcctttgcgatatgcgtccatcaactacatgtcgagaagcgaggtttgacagcagagtttgtggaaaaaggcgacgggactatatccgctcccgcgacccgggatgactggcagtgtgatgtcgtatttagccttattttgaacaccaactttgctcaacatattgaccaagatacgttagttacatcactaccaaagcgattggctcggggttcagcaaaaattgcgattgatgactttaaacatatcaactcattctcgacattagaaacagcgatcgaatctctgccaatagaagctggtaggtggttatcactttacgcacagtcaaacaataatctaagtgatctattagcagccatgacagaggaccatcagctcatggcaagctgcgtcggttaccacttgttagaagagcccaaagataaaccaaactccctcagaggttacaaacacgctatcgccgagtgcatcattggactcattaactcaatcacctttagctcagagactgatcccaacacaatcttttggtcgctaaagaactatcaaaactacctagtggtacagccaaggagtatcaacgatgaaactaccgacaaatctagcctatgagcgctctatcgacccatcagatgtctgtttttttgtcgtctggcccgatgatagaaaaacacctttaacctacaattctcgtactctgctcgggcaaatggaagcggcatcattagcctatgatgtctcaggtcaaccaataaaaagtgccaccgctgaggcgttagctcaagggaaccctcatcaagttgatttctgccacgttccatacggtgcgagtcatattgaatgcagtttctccgtctcgttttcttctgaactacgtcaaccatataagtgtaactcaagcaaagttaaacaaacgctagtgcaattagtcgagctctacgaaacgaaaatcggctggactgagctagcaacccgatatttgatgaacatttgcaacggtaaatggctgtggaaaaatacccgtaaagcctattgctggaacattgtacttacaccttggccttggaacggggaaaaggttggatttgaagatattcgtactaactacacctcacggcaagactttaaaaataataaaaattggtctgctatagttgaaatgatcaaaaccgcattttctagtactgatgggctggcgatatttgaagtcagggccaccttgcacttgccaacgaatgctatggtgcggccaagccaagttttcacagaaaaagaaagtggcagtaaaagtaaatctaaaactcaaaacagtcgagtttttcagagtacaactattgatggtgaacgatcgccaatactaggggcctttaaaacgggagcagctattgcaaccattgacgactggtatcctgaagccactgagccactaagggtcggacggtttggggttcatcgcgaagatgtcacttgctaccgtcatccgtctaccggaaaagattttttctcgatattacaacaagcagagcactatattgaagtgttgagcgccaacaaaactcccgctcaagaaactatcaacgacatgcactttttaatggctaacctgattaagggtgggatgttccagcataaaggagactgactgtgaaatggtattataagacaatcacctttctgccagagttgtgcaacaacgagtcactggctgcaaagtgtctccgcgttctgcatggatttaactatcagtatgagacacgaaatatcggcgtttcatttccgctttggtgtgatgcaacggttggaaaaaagatttcatttgtcagcaagaacaagatagaactcgacttactacttaaacaacactatttcgtccaaatggaacaacttcaatactttcatatatccaacactgttctcgtcccagaagattgtacatacgtttcctttagacgctgtcaatctatagataagctcacagcagcagggctggcaaggaaaatcagacgcctggagaaacgtgctctatctagaggcgagcaatttgacccatcatcttttgctcaaaaagagcatactgcaatagcgcactaccactcacttggggagtccagcaaacagacgaaccgcaactttcgactcaatatcaggatgctctcggagcaaccccgtgaggggaactcgatttttagtagctatggcttatcaaattcagaaaactcgtttcagcctgtacccttaatctgacctttaataaggagatataccatggcgacaagtttacctacgccctcagcaattacgacttcggcgttagagtatgcattccatactcccgctcgcaatctaacgaaatctcgcggaaaaaacattcatcgttatgtcagtgtaaagatgagtaagaggattacggtagaatctactctagagtgtgatgcctgctatcactttgattttgagccaagtattgttcgcttttgcgctcaaccgattcgatttttatattatctcaatggtcagtctcactcctatgttcctgactttctagttcaatttgataccaacgagtttgttctatatgaagtaaagtcagcttatgctaagaacaaacctgattttgatgttgaatgggaggcgaaagtaaaagcagcaactgaactagggctagaattggagcttgttgaagagagtgatattagggatacggttgtattaaataatcttaagcgcatgcatcgttatgcttcgaaagatgagctgaataacgtacataactctctcttaaaaataataaagtacaatggcgcccaatctgcaagatgcttgggagaacagttgggtttaaaaggccgaactgttttaccaattttgtgcgatttgctgtcaaggtgtttactcgatacacgtttggataagcctctatctcttgaatctcgatttgagttggccagttatggctaagaaagggttctcaagtttccatagaaaagcagtctcttcccaagatacgcttgaatcgatagagcttgtctctagcgctaattgtctagaaagtgttacgtatcaagatatatcagcatttcccgaaacaattgcggtagagattaatttccgattaagcattcttcgctttttagcgcgaaagtgcgaaaccattgtggccaaatcaattgaaccacatcgtgtagagctacagcaaaactatagtagaaaaatacccagtgcaataacgatatatcgatggtggcttgcttttcgaaaatcagactacaaccccattagcttagcacctaatatcaaggatagaggtaatagagagacaaaagtgtcaacagttgttgattctattatggaacaggcagttgaaagagttatatctggacgaaaagtcaatgttagctctgcatataaacgtgttcgacgaaaagttcgtcaatacaatctaactcatggaacgaaatacacgtatcctaagtacgaatctgtaagaaagcgagtaaaaaagaaaaccccatttgagttattagccgcagggaaaggggagagagtagctaagagagagtttcgccgaatgggaaaaaagatcctcacgtctagcgtgctagagagggttgaaatagatcacactgtcgttgacctttttgcagtacacgaagagtatcgaatcccattgggccgaccttggcttactcaattggttgattgttacagtaaagctgtaatcggtttttatttaggtttcgagcctcctagctatgtgtcggtttcccttgcacttaagaatgcaatacaacgcaaagatgacttaatctcctcgtatgaatcgatcgagaatgaatggctatgttatggcatcccagacctactcgtaactgataatggtaaagagtttttgtcgaaagcatttgatcaagcatgtgaatcactattgatcaatgtgcatcaaaataaagttgagacgcccgacaacaaacctcatgttgaacgtaactacgggactattaatacttctctgttagacgatttacctgggaaatccttcagccagtaccttcaaagagaagggtacgactctgtgggagaagctacccttacactcaatgagattagagaaatttacttaatttggttggtggatatttatcataaaaaacccaatcagagaggcactaattgtcctaatgttgcgtggaaaaagggttgtcaagaatgggaaccagaggagttctctggttctaaagacgaattagactttaaatttgctattgttgattacaaacaacttactaaagtagggataactgtctacaaagaactgagttatagcaatgaccgtttagctgaatatagagggaagaaaggaaaccataaagttcagttcaagtataaccctgagtgtatggcagttatttgggtgttggatgaggatatgaatgagtactttacagttaatgcgattgactacgaatatgcaagtagagtatcactttggcaacataaatataacatgaaatatcaagcagaactaaattcagcagaatatgatgaggacaaggaaattgatgcagaaataaaaattgaagaaatcgcagatcgttcaattgttaagactaacaaaatcagagctcggaggcgtggcgctaggcatcaagagaatagcgcaagggctaagtcaatcagtaatgcgaacccggcctcgatacaaaaacatgaagatgaaatcgttagtgcagataatgacgattgggatattgattatgtctgagaaatcgtcaaatgagtgaaacgcgtgaggctcgtatatcaagagctaaaagggcatttgtatccacaccgagcgttaggaaaatcttgagttacatggatagatgtagagatctatcagacctagagtctgagcctacatgcatgatggtctatggtgcttcgggtgtaggtaaaacgaccgtcatcaagaaatacttaaatcaaaacagaagagagtccgaagccgggggcgatataataccggttttgcatattgagttgccagacaatgcgaagccagtagatgcagcaagggaattgctggttgaaatgggtgacccgctagcactttatgaaactgacttagctagattgacgaaaagactgactgaattaatccctgcggtcggcgtgaagctgattattatcgatgagttccaacatttggtggaagaaaggtcaaatcgggttcttacccaagtaggtaattggctaaaaatgatacttaacaaaacgaaatgtccaattgttatatttggtatgccatactcaaaagttgtactgcaagcaaactcgcaacttcacgggcgattttccattcaggttgaactgcgcccctttagctaccagggaggtagaggtgtatttaaaacttttttggaataccttgataaagccctaccttttgaaaaacaggctggcttagccaacgaaagtttgcagaaaaaattgtatgcattctctcagggaaacatgcgttcgttgagaaaccttatttatcaagcatctatcgaagcaattgataatcagcatgagacgataaccgaagaagatttcgtttttgcatcgaagttgacatcgggcgataaacccaactcatggaaaaatccttttgaggagggtgttgaggtaacagaagatatgttacgaccgccaccaaaagatattggttgggaggactatttgagacattcaaccccgagagtgagtaaaccaggtagaaataaaaactttttcgaataacctaggctgctgcgctgctgccaccgctgagcaataactagcataaccccttggggcctctaaacgggtcttgaggggttttttgctgaaacctcaggcatttgagaagcacacggtcacactgcttccggtagtcaataaaccggtaaaccagcaatagacataagcggctatttaacgaccctgccctgaaccgacgaccgggtcatcgtggccggatcttgcggcccctcggcttgaacgaattgttagacattatttgccgactaccttggtgatctcgcctttcacgtagtggacaaattcttccaactgatctgcgcgcgaggccaagcgatcttcttcttgtccaagataagcctgtctagcttcaagtatgacgggctgatactgggccggcaggcgctccattgcccagtcggcagcgacatccttcggcgcgattttgccggttactgcgctgtaccaaatgcgggacaacgtaagcactacatttcgctcatcgccagcccagtcgggcggcgagttccatagcgttaaggtttcatttagcgcctcaaatagatcctgttcaggaaccggatcaaagagttcctccgccgctggacctaccaaggcaacgctatgttctcttgcttttgtcagcaagatagccagatcaatgtcgatcgtggctggctcgaagatacctgcaagaatgtcattgcgctgccattctccaaattgcagttcgcgcttagctggataacgccacggaatgatgtcgtcgtgcacaacaatggtgacttctacagcgcggagaatctcgctctctccaggggaagccgaagtttccaaaaggtcgttgatcaaagctcgccgcgttgtttcatcaagccttacggtcaccgtaaccagcaaatcaatatcactgtgtggcttcaggccgccatccactgcggagccgtacaaatgtacggccagcaacgtcggttcgagatggcgctcgatgacgccaactacctctgatagttgagtcgatacttcggcgatcaccgcttccctcatactcttcctttttcaatattattgaagcatttatcagggttattgtctcatgagcggatacatatttgaatgtatttagaaaaataaacaaatagctagctcactcggtcgctacgctccgggcgtgagactgcggcgggcgctgcggacacatacaaagttacccacagattccgtggataagcaggggactaacatgtgaggcaaaacagcagggccgcgccggtggcgtttttccataggctccgccctcctgccagagttcacataaacagacgcttttccggtgcatctgtgggagccgtgaggctcaaccatgaatctgacagtacgggcgaaacccgacaggacttaaagatccccaccgtttccggcgggtcgctccctcttgcgctctcctgttccgaccctgccgtttaccggatacctgttccgcctttctcccttacgggaagtgtggcgctttctcatagctcacacactggtatctcggctcggtgtaggtcgttcgctccaagctgggctgtaagcaagaactccccgttcagcccgactgctgcgccttatccggtaactgttcacttgagtccaacccggaaaagcacggtaaaacgccactggcagcagccattggtaactgggagttcgcagaggatttgtttagctaaacacgcggttgctcttgaagtgtgcgccaaagtccggctacactggaaggacagatttggttgctgtgctctgcgaaagccagttaccacggttaagcagttccccaactgacttaaccttcgatcaaaccacctccccaggtggttttttcgtttacagggcaaaagattacgcgcagaaaaaaaggatctcaagaagatcctttgatcttttctactgaaccgctctagatttcagtgcaatttatctcttcaaatgtagcacctgaagtcagccccatacgatataagttgtaattctcatgttagtcatgccccgcgcccaccggaaggagctgactgggttgaaggctctcaagggcatcggtcgagatcccggtgcctaatgagtgagctaacttacattaattgcgttgcgctcactgcccgctttccagtcgggaaacctgtcgtgccagctgcattaatgaatcggccaacgcgcggggagaggcggtttgcgtattgggcgccagggtggtttttcttttcaccagtgagacgggcaacagctgattgcccttcaccgcctggccctgagagagttgcagcaagcggtccacgctggtttgccccagcaggcgaaaatcctgtttgatggtggttaacggcgggatataacatgagctgtcttcggtatcgtcgtatcccactaccgagatgtccgcaccaacgcgcagcccggactcggtaatggcgcgcattgcgcccagcgccatctgatcgttggcaaccagcatcgcagtgggaacgatgccctcattcagcatttgcatggtttgttgaaaaccggacatggcactccagtcgccttcccgttccgctatcggctgaatttgattgcgagtgagatatttatgccagccagccagacgcagacgcgccgagacagaacttaatgggcccgctaacagcgcgatttgctggtgacccaatgcgaccagatgctccacgcccagtcgcgtaccgtcttcatgggagaaaataatactgttgatgggtgtctggtcagagacatcaagaaataacgccggaacattagtgcaggcagcttccacagcaatggcatcctggtcatccagcggatagttaatgatcagcccactgacgcgttgcgcgagaagattgtgcaccgccgctttacaggcttcgacgccgcttcgttctaccatcgacaccaccacgctggcacccagttgatcggcgcgagatttaatcgccgcgacaatttgcgacggcgcgtgcagggccagactggaggtggcaacgccaatcagcaacgactgtttgcccgccagttgttgtgccacgcggttgggaatgtaattcagctccgccatcgccgcttccactttttcccgcgttttcgcagaaacgtggctggcctggttcaccacgcgggaaacggtctgataagagacaccggcatactctgcgacatcgtataacgttactggtttcac

SEQ ID NO: 51 - DNA, 11812 bp, artificial sequence
  Synthetic
attcaccaccctgaattgactctcttccgggcgctatcatgccataccgcgaaaggttttgcgccattcgatggtgtccgggatctcgacgctctcccttatgcgactcctgcattaggaaattaatacgactcactataggggaattgtgagcggataacaattcccctgtagaaataattttgtttaactttaataaggagatataccatgggtgaactgccgagtaggtagctgataacacccagtcccagacgaagccgccctgtaaacggtgaactgccgagtaggtagctgataacggatccgaattcgagcgaaggagatatacatatgtttttgcaaagacctaaaccttacagcgatgaaagtttagaaagtttctttatccgagtggctaacaaaaatggctacggtgatgtccatcgcttcctagaagccactaaacgattccttcaagacattgaccataatggctatcaaacctttccgactgatataactcggataaacccatactcagctaaaaacagttccagcgcacgaactgcgtcattcctgaaacttgcacaattgacatttaatgaaccgccagagctacttgggttggcaattaacagaacaaacatgaaatactcgccgtcaactagcgcggttgttagaggtgcagaagtctttcctcgcagtttactacggacgcactccatcccctgctgtcctttgtgtctgcgagaaaatggctacgcctcctacctttggcactttcaggggtacgaatactgccacagccataacgtacctttaattaccacttgtagctgtggtaaggagtttgactaccgagtatctgggttaaagggcatttgctgcaaatgcaaggagcctatcaccttaaccagcagggagaacggtcatgaggcagcgtgtactgtttcaaactggcttgctggccatgaatctaaacctctgccaaatcttcctaaaagctaccgatggggtttagttcattggtggatgggtattaaagatagcgagttcgatcacttttcgttcgttcaatttttctcaaactggccaaggtcattccactcgataatcgaagatgaagtagagttcaaccttgagcatgctgttgtcagcacgtctgaattacgactaaaagatcttcttggtcgattgtttttcggttcaattcggttacctgagcggaatcttcaacacaatatcatccttggtgagcttctctgctatttagaaaatcgtttatggcaagacaagggattaatcgccaacctcaaaatgaacgcgttagaggcgactgtaatgttaaattgtagcctcgatcagattgcatcaatggttgaacaacgcatcttgaagccaaatcgaaaaagcaagcccaacagccctcttgatgttaccgattatctatttcatttcggcgatattttctgtctttggttagctgagttccaaagcgatgagtttaaccgttcgttttatgtgtcgaggtggtaaatgcaaactctgaaagaactaatcgcatccaatcctgacgacttaacaactgaacttaagagagcatttcgtccactcacaccgcatattgcaattgatggtaatgaacttgacgcactgacgatattagtcaatttaaccgataagactgatgatcagaaagacctgctcgatcgagccaaatgcaagcaaaaacttcgagatgaaaaatggtgggctagctgcataaattgcgttaattacagacaaagccataacccaaaattcccggatatacgttctgaaggcgtgattcgaacccaagccctgggtgaattaccgagtttcctactctcgtcctcaaaaatcccaccataccattggtcatatagccatgattcaaaatacgtcaacaaaagcgcattcctcaccaatgagttttgttgggatggtgagatctcatgtttgggtgagcttcttaaagatgcagatcacccactttggaatactttgaaaaagttaggttgttctcaaaaaacttgcaaagcaatggcaaaacaactagctgatattactctcacgactatcaatgtcacactcgcaccaaattacctgactcaaatatctctccccgatagtgatacatcctacatttcactctctcctgttgcatcgctatcgatgcaaagccactttcatcagaggctccaagatgaaaatcggcatagcgcgataacgcggtttagccgaactaccaacatgggggtcactgcgatgacatgtggcggcgcatttagaatgttaaagtctggcgctaagttttccagcccccctcatcaccgattaaacagtaaacgaagttggttgacgtcagagcatgttcagtcattaaaacagtaccagcgcctcaacaaaagcctcatacctgaaaactctcggattgcactccgtagaaaatacaaaatcgagcttcaaaatatggtcagatcttggtttgcaatgcaagaccatacccttgattcgaacatacttatccaacatttgaatcatgacctatcttacttaggagccacaaaacgttttgcatacgatccagcgatgaccaagctctttactgagcttttgaaacgagagttatcaaattcaatcaataatggtgagcaacacactaatggatcgtttttagtcctaccgaatatcagggtttgtggcgcaacagctttaagctccccggtaacggtggggattccatcacttacagctttctttggcttcgttcacgcatttgaacggaatataaatcgcaccacctcatcgtttcgtgttgaatcctttgcgatatgcgtccatcaactacatgtcgagaagcgaggtttgacagcagagtttgtggaaaaaggcgacgggactatatccgctcccgcgacccgggatgactggcagtgtgatgtcgtatttagccttattttgaacaccaactttgctcaacatattgaccaagatacgttagttacatcactaccaaagcgattggctcggggttcagcaaaaattgcgattgatgactttaaacatatcaactcattctcgacattagaaacagcgatcgaatctctgccaatagaagctggtaggtggttatcactttacgcacagtcaaacaataatctaagtgatctattagcagccatgacagaggaccatcagctcatggcaagctgcgtcggttaccacttgttagaagagcccaaagataaaccaaactccctcagaggttacaaacacgctatcgccgagtgcatcattggactcattaactcaatcacctttagctcagagactgatcccaacacaatcttttggtcgctaaagaactatcaaaactacctagtggtacagccaaggagtatcaacgatgaaactaccgacaaatctagcctatgagcgctctatcgacccatcagatgtctgtttttttgtcgtctggcccgatgatagaaaaacacctttaacctacaattctcgtactctgctcgggcaaatggaagcggcatcattagcctatgatgtctcaggtcaaccaataaaaagtgccaccgctgaggcgttagctcaagggaaccctcatcaagttgatttctgccacgttccatacggtgcgagtcatattgaatgcagtttctccgtctcgttttcttctgaactacgtcaaccatataagtgtaactcaagcaaagttaaacaaacgctagtgcaattagtcgagctctacgaaacgaaaatcggctggactgagctagcaacccgatatttgatgaacatttgcaacggtaaatggctgtggaaaaatacccgtaaagcctattgctggaacattgtacttacaccttggccttggaacggggaaaaggttggatttgaagatattcgtactaactacacctcacggcaagactttaaaaataataaaaattggtctgctatagttgaaatgatcaaaaccgcattttctagtactgatgggctggcgatatttgaagtcagggccaccttgcacttgccaacgaatgctatggtgcggccaagccaagttttcacagaaaaagaaagtggcagtaaaagtaaatctaaaactcaaaacagtcgagtttttcagagtacaactattgatggtgaacgatcgccaatactaggggcctttaaaacgggagcagctattgcaaccattgacgactggtatcctgaagccactgagccactaagggtcggacggtttggggttcatcgcgaagatgtcacttgctaccgtcatccgtctaccggaaaagattttttctcgatattacaacaagcagagcactatattgaagtgttgagcgccaacaaaactcccgctcaagaaactatcaacgacatgcactttttaatggctaacctgattaagggtgggatgttccagcataaaggagactgactgtgaaatggtattataagacaatcacctttctgccagagttgtgcaacaacgagtcactggctgcaaagtgtctccgcgttctgcatggatttaactatcagtatgagacacgaaatatcggcgtttcatttccgctttggtgtgatgcaacggttggaaaaaagatttcatttgtcagcaagaacaagatagaactcgacttactacttaaacaacactatttcgtccaaatggaacaacttcaatactttcatatatccaacactgttctcgtcccagaagattgtacatacgtttcctttagacgctgtcaatctatagataagctcacagcagcagggctggcaaggaaaatcagacgcctggagaaacgtgctctatctagaggcgagcaatttgacccatcatcttttgctcaaaaagagcatactgcaatagcgcactaccactcacttggggagtccagcaaacagacgaaccgcaactttcgactcaatatcaggatgctctcggagcaaccccgtgaggggaactcgatttttagtagctatggcttatcaaattcagaaaactcgtttcagcctgtacccttaatctgacctttaataaggagatataccatggcgacaagtttacctacgccctcagcaattacgacttcggcgttagagtatgcattccatactcccgctcgcaatctaacgaaatctcgcggaaaaaacattcatcgttatgtcagtgtaaagatgagtaagaggattacggtagaatctactctagagtgtgatgcctgctatcactttgattttgagccaagtattgttcgcttttgcgctcaaccgattcgatttttatattatctcaatggtcagtctcactcctatgttcctgactttctagttcaatttgataccaacgagtttgttctatatgaagtaaagtcagcttatgctaagaacaaacctgattttgatgttgaatgggaggcgaaagtaaaagcagcaactgaactagggctagaattggagcttgttgaagagagtgatattagggatacggttgtattaaataatcttaagcgcatgcatcgttatgcttcgaaagatgagctgaataacgtacataactctctcttaaaaataataaagtacaatggcgcccaatctgcaagatgcttgggagaacagttgggtttaaaaggccgaactgttttaccaattttgtgcgatttgctgtcaaggtgtttactcgatacacgtttggataagcctctatctcttgaatctcgatttgagttggccagttatggctaagaaagggttctcaagtttccatagaaaagcagtctcttcccaagatacgcttgaatcgatagagcttgtctctagcgctaattgtctagaaagtgttacgtatcaagatatatcagcatttcccgaaacaattgcggtagagattaatttccgattaagcattcttcgctttttagcgcgaaagtgcgaaaccattgtggccaaatcaattgaaccacatcgtgtagagctacagcaaaactatagtagaaaaatacccagtgcaataacgatatatcgatggtggcttgcttttcgaaaatcagactacaaccccattagcttagcacctaatatcaaggatagaggtaatagagagacaaaagtgtcaacagttgttgattctattatggaacaggcagttgaaagagttatatctggacgaaaagtcaatgttagctctgcatataaacgtgttcgacgaaaagttcgtcaatacaatctaactcatggaacgaaatacacgtatcctaagtacgaatctgtaagaaagcgagtaaaaaagaaaaccccatttgagttattagccgcagggaaaggggagagagtagctaagagagagtttcgccgaatgggaaaaaagatcctcacgtctagcgtgctagagagggttgaaatagatcacactgtcgttgacctttttgcagtacacgaagagtatcgaatcccattgggccgaccttggcttactcaattggttgattgttacagtaaagctgtaatcggtttttatttaggtttcgagcctcctagctatgtgtcggtttcccttgcacttaagaatgcaatacaacgcaaagatgacttaatctcctcgtatgaatcgatcgagaatgaatggctatgttatggcatcccagacctactcgtaactgataatggtaaagagtttttgtcgaaagcatttgatcaagcatgtgaatcactattgatcaatgtgcatcaaaataaagttgagacgcccgacaacaaacctcatgttgaacgtaactacgggactattaatacttctctgttagacgatttacctgggaaatccttcagccagtaccttcaaagagaagggtacgactctgtgggagaagctacccttacactcaatgagattagagaaatttacttaatttggttggtggatatttatcataaaaaacccaatcagagaggcactaattgtcctaatgttgcgtggaaaaagggttgtcaagaatgggaaccagaggagttctctggttctaaagacgaattagactttaaatttgctattgttgattacaaacaacttactaaagtagggataactgtctacaaagaactgagttatagcaatgaccgtttagctgaatatagagggaagaaaggaaaccataaagttcagttcaagtataaccctgagtgtatggcagttatttgggtgttggatgaggatatgaatgagtactttacagttaatgcgattgactacgaatatgcaagtagagtatcactttggcaacataaatataacatgaaatatcaagcagaactaaattcagcagaatatgatgaggacaaggaaattgatgcagaaataaaaattgaagaaatcgcagatcgttcaattgttaagactaacaaaatcagagctcggaggcgtggcgctaggcatcaagagaatagcgcaagggctaagtcaatcagtaatgcgaacccggcctcgatacaaaaacatgaagatgaaatcgttagtgcagataatgacgattgggatattgattatgtctgagaaatcgtcaaatgagtgaaacgcgtgaggctcgtatatcaagagctaaaagggcatttgtatccacaccgagcgttaggaaaatcttgagttacatggatagatgtagagatctatcagacctagagtctgagcctacatgcatgatggtctatggtgcttcgggtgtaggtaaaacgaccgtcatcaagaaatacttaaatcaaaacagaagagagtccgaagccgggggcgatataataccggttttgcatattgagttgccagacaatgcgaagccagtagatgcagcaagggaattgctggttgaaatgggtgacccgctagcactttatgaaactgacttagctagattgacgaaaagactgactgaattaatccctgcggtcggcgtgaagctgattattatcgatgagttccaacatttggtggaagaaaggtcaaatcgggttcttacccaagtaggtaattggctaaaaatgatacttaacaaaacgaaatgtccaattgttatatttggtatgccatactcaaaagttgtactgcaagcaaactcgcaacttcacgggcgattttccattcaggttgaactgcgcccctttagctaccagggaggtagaggtgtatttaaaacttttttggaataccttgataaagccctaccttttgaaaaacaggctggcttagccaacgaaagtttgcagaaaaaattgtatgcattctctcagggaaacatgcgttcgttgagaaaccttatttatcaagcatctatcgaagcaattgataatcagcatgagacgataaccgaagaagatttcgtttttgcatcgaagttgacatcgggcgataaacccaactcatggaaaaatccttttgaggagggtgttgaggtaacagaagatatgttacgaccgccaccaaaagatattggttgggaggactatttgagacattcaaccccgagagtgagtaaaccaggtagaaataaaaactttttcgaataacctaggctgctgcgctgctgccaccgctgagcaataactagcataaccccttggggcctctaaacgggtcttgaggggttttttgctgaaacctcaggcatttgagaagcacacggtcacactgcttccggtagtcaataaaccggtaaaccagcaatagacataagcggctatttaacgaccctgccctgaaccgacgaccgggtcatcgtggccggatcttgcggcccctcggcttgaacgaattgttagacattatttgccgactaccttggtgatctcgcctttcacgtagtggacaaattcttccaactgatctgcgcgcgaggccaagcgatcttcttcttgtccaagataagcctgtctagcttcaagtatgacgggctgatactgggccggcaggcgctccattgcccagtcggcagcgacatccttcggcgcgattttgccggttactgcgctgtaccaaatgcgggacaacgtaagcactacatttcgctcatcgccagcccagtcgggcggcgagttccatagcgttaaggtttcatttagcgcctcaaatagatcctgttcaggaaccggatcaaagagttcctccgccgctggacctaccaaggcaacgctatgttctcttgcttttgtcagcaagatagccagatcaatgtcgatcgtggctggctcgaagatacctgcaagaatgtcattgcgctgccattctccaaattgcagttcgcgcttagctggataacgccacggaatgatgtcgtcgtgcacaacaatggtgacttctacagcgcggagaatctcgctctctccaggggaagccgaagtttccaaaaggtcgttgatcaaagctcgccgcgttgtttcatcaagccttacggtcaccgtaaccagcaaatcaatatcactgtgtggcttcaggccgccatccactgcggagccgtacaaatgtacggccagcaacgtcggttcgagatggcgctcgatgacgccaactacctctgatagttgagtcgatacttcggcgatcaccgcttccctcatactcttcctttttcaatattattgaagcatttatcagggttattgtctcatgagcggatacatatttgaatgtatttagaaaaataaacaaatagctagctcactcggtcgctacgctccgggcgtgagactgcggcgggcgctgcggacacatacaaagttacccacagattccgtggataagcaggggactaacatgtgaggcaaaacagcagggccgcgccggtggcgtttttccataggctccgccctcctgccagagttcacataaacagacgcttttccggtgcatctgtgggagccgtgaggctcaaccatgaatctgacagtacgggcgaaacccgacaggacttaaagatccccaccgtttccggcgggtcgctccctcttgcgctctcctgttccgaccctgccgtttaccggatacctgttccgcctttctcccttacgggaagtgtggcgctttctcatagctcacacactggtatctcggctcggtgtaggtcgttcgctccaagctgggctgtaagcaagaactccccgttcagcccgactgctgcgccttatccggtaactgttcacttgagtccaacccggaaaagcacggtaaaacgccactggcagcagccattggtaactgggagttcgcagaggatttgtttagctaaacacgcggttgctcttgaagtgtgcgccaaagtccggctacactggaaggacagatttggttgctgtgctctgcgaaagccagttaccacggttaagcagttccccaactgacttaaccttcgatcaaaccacctccccaggtggttttttcgtttacagggcaaaagattacgcgcagaaaaaaaggatctcaagaagatcctttgatcttttctactgaaccgctctagatttcagtgcaatttatctcttcaaatgtagcacctgaagtcagccccatacgatataagttgtaattctcatgttagtcatgccccgcgcccaccggaaggagctgactgggttgaaggctctcaagggcatcggtcgagatcccggtgcctaatgagtgagctaacttacattaattgcgttgcgctcactgcccgctttccagtcgggaaacctgtcgtgccagctgcattaatgaatcggccaacgcgcggggagaggcggtttgcgtattgggcgccagggtggtttttcttttcaccagtgagacgggcaacagctgattgcccttcaccgcctggccctgagagagttgcagcaagcggtccacgctggtttgccccagcaggcgaaaatcctgtttgatggtggttaacggcgggatataacatgagctgtcttcggtatcgtcgtatcccactaccgagatgtccgcaccaacgcgcagcccggactcggtaatggcgcgcattgcgcccagcgccatctgatcgttggcaaccagcatcgcagtgggaacgatgccctcattcagcatttgcatggtttgttgaaaaccggacatggcactccagtcgccttcccgttccgctatcggctgaatttgattgcgagtgagatatttatgccagccagccagacgcagacgcgccgagacagaacttaatgggcccgctaacagcgcgatttgctggtgacccaatgcgaccagatgctccacgcccagtcgcgtaccgtcttcatgggagaaaataatactgttgatgggtgtctggtcagagacatcaagaaataacgccggaacattagtgcaggcagcttccacagcaatggcatcctggtcatccagcggatagttaatgatcagcccactgacgcgttgcgcgagaagattgtgcaccgccgctttacaggcttcgacgccgcttcgttctaccatcgacaccaccacgctggcacccagttgatcggcgcgagatttaatcgccgcgacaatttgcgacggcgcgtgcagggccagactggaggtggcaacgccaatcagcaacgactgtttgcccgccagttgttgtgccacgcggttgggaatgtaattcagctccgccatcgccgcttccactttttcccgcgttttcgcagaaacgtggctggcctggttcaccacgcgggaaacggtctgataagagacaccggcatactctgcgacatcgtataacgttactggtttcac

SEQ ID NO: 52 - DNA, 11812 bp, artificial sequence
  Synthetic
attcaccaccctgaattgactctcttccgggcgctatcatgccataccgcgaaaggttttgcgccattcgatggtgtccgggatctcgacgctctcccttatgcgactcctgcattaggaaattaatacgactcactataggggaattgtgagcggataacaattcccctgtagaaataattttgtttaactttaataaggagatataccatgggtgaactgccgagtaggtagctgataacctaatccgagccagtttacccgctctgctaccgtgaactgccgagtaggtagctgataacggatccgaattcgagcgaaggagatatacatatgtttttgcaaagacctaaaccttacagcgatgaaagtttagaaagtttctttatccgagtggctaacaaaaatggctacggtgatgtccatcgcttcctagaagccactaaacgattccttcaagacattgaccataatggctatcaaacctttccgactgatataactcggataaacccatactcagctaaaaacagttccagcgcacgaactgcgtcattcctgaaacttgcacaattgacatttaatgaaccgccagagctacttgggttggcaattaacagaacaaacatgaaatactcgccgtcaactagcgcggttgttagaggtgcagaagtctttcctcgcagtttactacggacgcactccatcccctgctgtcctttgtgtctgcgagaaaatggctacgcctcctacctttggcactttcaggggtacgaatactgccacagccataacgtacctttaattaccacttgtagctgtggtaaggagtttgactaccgagtatctgggttaaagggcatttgctgcaaatgcaaggagcctatcaccttaaccagcagggagaacggtcatgaggcagcgtgtactgtttcaaactggcttgctggccatgaatctaaacctctgccaaatcttcctaaaagctaccgatggggtttagttcattggtggatgggtattaaagatagcgagttcgatcacttttcgttcgttcaatttttctcaaactggccaaggtcattccactcgataatcgaagatgaagtagagttcaaccttgagcatgctgttgtcagcacgtctgaattacgactaaaagatcttcttggtcgattgtttttcggttcaattcggttacctgagcggaatcttcaacacaatatcatccttggtgagcttctctgctatttagaaaatcgtttatggcaagacaagggattaatcgccaacctcaaaatgaacgcgttagaggcgactgtaatgttaaattgtagcctcgatcagattgcatcaatggttgaacaacgcatcttgaagccaaatcgaaaaagcaagcccaacagccctcttgatgttaccgattatctatttcatttcggcgatattttctgtctttggttagctgagttccaaagcgatgagtttaaccgttcgttttatgtgtcgaggtggtaaatgcaaactctgaaagaactaatcgcatccaatcctgacgacttaacaactgaacttaagagagcatttcgtccactcacaccgcatattgcaattgatggtaatgaacttgacgcactgacgatattagtcaatttaaccgataagactgatgatcagaaagacctgctcgatcgagccaaatgcaagcaaaaacttcgagatgaaaaatggtgggctagctgcataaattgcgttaattacagacaaagccataacccaaaattcccggatatacgttctgaaggcgtgattcgaacccaagccctgggtgaattaccgagtttcctactctcgtcctcaaaaatcccaccataccattggtcatatagccatgattcaaaatacgtcaacaaaagcgcattcctcaccaatgagttttgttgggatggtgagatctcatgtttgggtgagcttcttaaagatgcagatcacccactttggaatactttgaaaaagttaggttgttctcaaaaaacttgcaaagcaatggcaaaacaactagctgatattactctcacgactatcaatgtcacactcgcaccaaattacctgactcaaatatctctccccgatagtgatacatcctacatttcactctctcctgttgcatcgctatcgatgcaaagccactttcatcagaggctccaagatgaaaatcggcatagcgcgataacgcggtttagccgaactaccaacatgggggtcactgcgatgacatgtggcggcgcatttagaatgttaaagtctggcgctaagttttccagcccccctcatcaccgattaaacagtaaacgaagttggttgacgtcagagcatgttcagtcattaaaacagtaccagcgcctcaacaaaagcctcatacctgaaaactctcggattgcactccgtagaaaatacaaaatcgagcttcaaaatatggtcagatcttggtttgcaatgcaagaccatacccttgattcgaacatacttatccaacatttgaatcatgacctatcttacttaggagccacaaaacgttttgcatacgatccagcgatgaccaagctctttactgagcttttgaaacgagagttatcaaattcaatcaataatggtgagcaacacactaatggatcgtttttagtcctaccgaatatcagggtttgtggcgcaacagctttaagctccccggtaacggtggggattccatcacttacagctttctttggcttcgttcacgcatttgaacggaatataaatcgcaccacctcatcgtttcgtgttgaatcctttgcgatatgcgtccatcaactacatgtcgagaagcgaggtttgacagcagagtttgtggaaaaaggcgacgggactatatccgctcccgcgacccgggatgactggcagtgtgatgtcgtatttagccttattttgaacaccaactttgctcaacatattgaccaagatacgttagttacatcactaccaaagcgattggctcggggttcagcaaaaattgcgattgatgactttaaacatatcaactcattctcgacattagaaacagcgatcgaatctctgccaatagaagctggtaggtggttatcactttacgcacagtcaaacaataatctaagtgatctattagcagccatgacagaggaccatcagctcatggcaagctgcgtcggttaccacttgttagaagagcccaaagataaaccaaactccctcagaggttacaaacacgctatcgccgagtgcatcattggactcattaactcaatcacctttagctcagagactgatcccaacacaatcttttggtcgctaaagaactatcaaaactacctagtggtacagccaaggagtatcaacgatgaaactaccgacaaatctagcctatgagcgctctatcgacccatcagatgtctgtttttttgtcgtctggcccgatgatagaaaaacacctttaacctacaattctcgtactctgctcgggcaaatggaagcggcatcattagcctatgatgtctcaggtcaaccaataaaaagtgccaccgctgaggcgttagctcaagggaaccctcatcaagttgatttctgccacgttccatacggtgcgagtcatattgaatgcagtttctccgtctcgttttcttctgaactacgtcaaccatataagtgtaactcaagcaaagttaaacaaacgctagtgcaattagtcgagctctacgaaacgaaaatcggctggactgagctagcaacccgatatttgatgaacatttgcaacggtaaatggctgtggaaaaatacccgtaaagcctattgctggaacattgtacttacaccttggccttggaacggggaaaaggttggatttgaagatattcgtactaactacacctcacggcaagactttaaaaataataaaaattggtctgctatagttgaaatgatcaaaaccgcattttctagtactgatgggctggcgatatttgaagtcagggccaccttgcacttgccaacgaatgctatggtgcggccaagccaagttttcacagaaaaagaaagtggcagtaaaagtaaatctaaaactcaaaacagtcgagtttttcagagtacaactattgatggtgaacgatcgccaatactaggggcctttaaaacgggagcagctattgcaaccattgacgactggtatcctgaagccactgagccactaagggtcggacggtttggggttcatcgcgaagatgtcacttgctaccgtcatccgtctaccggaaaagattttttctcgatattacaacaagcagagcactatattgaagtgttgagcgccaacaaaactcccgctcaagaaactatcaacgacatgcactttttaatggctaacctgattaagggtgggatgttccagcataaaggagactgactgtgaaatggtattataagacaatcacctttctgccagagttgtgcaacaacgagtcactggctgcaaagtgtctccgcgttctgcatggatttaactatcagtatgagacacgaaatatcggcgtttcatttccgctttggtgtgatgcaacggttggaaaaaagatttcatttgtcagcaagaacaagatagaactcgacttactacttaaacaacactatttcgtccaaatggaacaacttcaatactttcatatatccaacactgttctcgtcccagaagattgtacatacgtttcctttagacgctgtcaatctatagataagctcacagcagcagggctggcaaggaaaatcagacgcctggagaaacgtgctctatctagaggcgagcaatttgacccatcatcttttgctcaaaaagagcatactgcaatagcgcactaccactcacttggggagtccagcaaacagacgaaccgcaactttcgactcaatatcaggatgctctcggagcaaccccgtgaggggaactcgatttttagtagctatggcttatcaaattcagaaaactcgtttcagcctgtacccttaatctgacctttaataaggagatataccatggcgacaagtttacctacgccctcagcaattacgacttcggcgttagagtatgcattccatactcccgctcgcaatctaacgaaatctcgcggaaaaaacattcatcgttatgtcagtgtaaagatgagtaagaggattacggtagaatctactctagagtgtgatgcctgctatcactttgattttgagccaagtattgttcgcttttgcgctcaaccgattcgatttttatattatctcaatggtcagtctcactcctatgttcctgactttctagttcaatttgataccaacgagtttgttctatatgaagtaaagtcagcttatgctaagaacaaacctgattttgatgttgaatgggaggcgaaagtaaaagcagcaactgaactagggctagaattggagcttgttgaagagagtgatattagggatacggttgtattaaataatcttaagcgcatgcatcgttatgcttcgaaagatgagctgaataacgtacataactctctcttaaaaataataaagtacaatggcgcccaatctgcaagatgcttgggagaacagttgggtttaaaaggccgaactgttttaccaattttgtgcgatttgctgtcaaggtgtttactcgatacacgtttggataagcctctatctcttgaatctcgatttgagttggccagttatggctaagaaagggttctcaagtttccatagaaaagcagtctcttcccaagatacgcttgaatcgatagagcttgtctctagcgctaattgtctagaaagtgttacgtatcaagatatatcagcatttcccgaaacaattgcggtagagattaatttccgattaagcattcttcgctttttagcgcgaaagtgcgaaaccattgtggccaaatcaattgaaccacatcgtgtagagctacagcaaaactatagtagaaaaatacccagtgcaataacgatatatcgatggtggcttgcttttcgaaaatcagactacaaccccattagcttagcacctaatatcaaggatagaggtaatagagagacaaaagtgtcaacagttgttgattctattatggaacaggcagttgaaagagttatatctggacgaaaagtcaatgttagctctgcatataaacgtgttcgacgaaaagttcgtcaatacaatctaactcatggaacgaaatacacgtatcctaagtacgaatctgtaagaaagcgagtaaaaaagaaaaccccatttgagttattagccgcagggaaaggggagagagtagctaagagagagtttcgccgaatgggaaaaaagatcctcacgtctagcgtgctagagagggttgaaatagatcacactgtcgttgacctttttgcagtacacgaagagtatcgaatcccattgggccgaccttggcttactcaattggttgattgttacagtaaagctgtaatcggtttttatttaggtttcgagcctcctagctatgtgtcggtttcccttgcacttaagaatgcaatacaacgcaaagatgacttaatctcctcgtatgaatcgatcgagaatgaatggctatgttatggcatcccagacctactcgtaactgataatggtaaagagtttttgtcgaaagcatttgatcaagcatgtgaatcactattgatcaatgtgcatcaaaataaagttgagacgcccgacaacaaacctcatgttgaacgtaactacgggactattaatacttctctgttagacgatttacctgggaaatccttcagccagtaccttcaaagagaagggtacgactctgtgggagaagctacccttacactcaatgagattagagaaatttacttaatttggttggtggatatttatcataaaaaacccaatcagagaggcactaattgtcctaatgttgcgtggaaaaagggttgtcaagaatgggaaccagaggagttctctggttctaaagacgaattagactttaaatttgctattgttgattacaaacaacttactaaagtagggataactgtctacaaagaactgagttatagcaatgaccgtttagctgaatatagagggaagaaaggaaaccataaagttcagttcaagtataaccctgagtgtatggcagttatttgggtgttggatgaggatatgaatgagtactttacagttaatgcgattgactacgaatatgcaagtagagtatcactttggcaacataaatataacatgaaatatcaagcagaactaaattcagcagaatatgatgaggacaaggaaattgatgcagaaataaaaattgaagaaatcgcagatcgttcaattgttaagactaacaaaatcagagctcggaggcgtggcgctaggcatcaagagaatagcgcaagggctaagtcaatcagtaatgcgaacccggcctcgatacaaaaacatgaagatgaaatcgttagtgcagataatgacgattgggatattgattatgtctgagaaatcgtcaaatgagtgaaacgcgtgaggctcgtatatcaagagctaaaagggcatttgtatccacaccgagcgttaggaaaatcttgagttacatggatagatgtagagatctatcagacctagagtctgagcctacatgcatgatggtctatggtgcttcgggtgtaggtaaaacgaccgtcatcaagaaatacttaaatcaaaacagaagagagtccgaagccgggggcgatataataccggttttgcatattgagttgccagacaatgcgaagccagtagatgcagcaagggaattgctggttgaaatgggtgacccgctagcactttatgaaactgacttagctagattgacgaaaagactgactgaattaatccctgcggtcggcgtgaagctgattattatcgatgagttccaacatttggtggaagaaaggtcaaatcgggttcttacccaagtaggtaattggctaaaaatgatacttaacaaaacgaaatgtccaattgttatatttggtatgccatactcaaaagttgtactgcaagcaaactcgcaacttcacgggcgattttccattcaggttgaactgcgcccctttagctaccagggaggtagaggtgtatttaaaacttttttggaataccttgataaagccctaccttttgaaaaacaggctggcttagccaacgaaagtttgcagaaaaaattgtatgcattctctcagggaaacatgcgttcgttgagaaaccttatttatcaagcatctatcgaagcaattgataatcagcatgagacgataaccgaagaagatttcgtttttgcatcgaagttgacatcgggcgataaacccaactcatggaaaaatccttttgaggagggtgttgaggtaacagaagatatgttacgaccgccaccaaaagatattggttgggaggactatttgagacattcaaccccgagagtgagtaaaccaggtagaaataaaaactttttcgaataacctaggctgctgcgctgctgccaccgctgagcaataactagcataaccccttggggcctctaaacgggtcttgaggggttttttgctgaaacctcaggcatttgagaagcacacggtcacactgcttccggtagtcaataaaccggtaaaccagcaatagacataagcggctatttaacgaccctgccctgaaccgacgaccgggtcatcgtggccggatcttgcggcccctcggcttgaacgaattgttagacattatttgccgactaccttggtgatctcgcctttcacgtagtggacaaattcttccaactgatctgcgcgcgaggccaagcgatcttcttcttgtccaagataagcctgtctagcttcaagtatgacgggctgatactgggccggcaggcgctccattgcccagtcggcagcgacatccttcggcgcgattttgccggttactgcgctgtaccaaatgcgggacaacgtaagcactacatttcgctcatcgccagcccagtcgggcggcgagttccatagcgttaaggtttcatttagcgcctcaaatagatcctgttcaggaaccggatcaaagagttcctccgccgctggacctaccaaggcaacgctatgttctcttgcttttgtcagcaagatagccagatcaatgtcgatcgtggctggctcgaagatacctgcaagaatgtcattgcgctgccattctccaaattgcagttcgcgcttagctggataacgccacggaatgatgtcgtcgtgcacaacaatggtgacttctacagcgcggagaatctcgctctctccaggggaagccgaagtttccaaaaggtcgttgatcaaagctcgccgcgttgtttcatcaagccttacggtcaccgtaaccagcaaatcaatatcactgtgtggcttcaggccgccatccactgcggagccgtacaaatgtacggccagcaacgtcggttcgagatggcgctcgatgacgccaactacctctgatagttgagtcgatacttcggcgatcaccgcttccctcatactcttcctttttcaatattattgaagcatttatcagggttattgtctcatgagcggatacatatttgaatgtatttagaaaaataaacaaatagctagctcactcggtcgctacgctccgggcgtgagactgcggcgggcgctgcggacacatacaaagttacccacagattccgtggataagcaggggactaacatgtgaggcaaaacagcagggccgcgccggtggcgtttttccataggctccgccctcctgccagagttcacataaacagacgcttttccggtgcatctgtgggagccgtgaggctcaaccatgaatctgacagtacgggcgaaacccgacaggacttaaagatccccaccgtttccggcgggtcgctccctcttgcgctctcctgttccgaccctgccgtttaccggatacctgttccgcctttctcccttacgggaagtgtggcgctttctcatagctcacacactggtatctcggctcggtgtaggtcgttcgctccaagctgggctgtaagcaagaactccccgttcagcccgactgctgcgccttatccggtaactgttcacttgagtccaacccggaaaagcacggtaaaacgccactggcagcagccattggtaactgggagttcgcagaggatttgtttagctaaacacgcggttgctcttgaagtgtgcgccaaagtccggctacactggaaggacagatttggttgctgtgctctgcgaaagccagttaccacggttaagcagttccccaactgacttaaccttcgatcaaaccacctccccaggtggttttttcgtttacagggcaaaagattacgcgcagaaaaaaaggatctcaagaagatcctttgatcttttctactgaaccgctctagatttcagtgcaatttatctcttcaaatgtagcacctgaagtcagccccatacgatataagttgtaattctcatgttagtcatgccccgcgcccaccggaaggagctgactgggttgaaggctctcaagggcatcggtcgagatcccggtgcctaatgagtgagctaacttacattaattgcgttgcgctcactgcccgctttccagtcgggaaacctgtcgtgccagctgcattaatgaatcggccaacgcgcggggagaggcggtttgcgtattgggcgccagggtggtttttcttttcaccagtgagacgggcaacagctgattgcccttcaccgcctggccctgagagagttgcagcaagcggtccacgctggtttgccccagcaggcgaaaatcctgtttgatggtggttaacggcgggatataacatgagctgtcttcggtatcgtcgtatcccactaccgagatgtccgcaccaacgcgcagcccggactcggtaatggcgcgcattgcgcccagcgccatctgatcgttggcaaccagcatcgcagtgggaacgatgccctcattcagcatttgcatggtttgttgaaaaccggacatggcactccagtcgccttcccgttccgctatcggctgaatttgattgcgagtgagatatttatgccagccagccagacgcagacgcgccgagacagaacttaatgggcccgctaacagcgcgatttgctggtgacccaatgcgaccagatgctccacgcccagtcgcgtaccgtcttcatgggagaaaataatactgttgatgggtgtctggtcagagacatcaagaaataacgccggaacattagtgcaggcagcttccacagcaatggcatcctggtcatccagcggatagttaatgatcagcccactgacgcgttgcgcgagaagattgtgcaccgccgctttacaggcttcgacgccgcttcgttctaccatcgacaccaccacgctggcacccagttgatcggcgcgagatttaatcgccgcgacaatttgcgacggcgcgtgcagggccagactggaggtggcaacgccaatcagcaacgactgtttgcccgccagttgttgtgccacgcggttgggaatgtaattcagctccgccatcgccgcttccactttttcccgcgttttcgcagaaacgtggctggcctggttcaccacgcgggaaacggtctgataagagacaccggcatactctgcgacatcgtataacgttactggtttcac

SEQ ID NO: 53 - DNA, 11812 bp, artificial sequence
  Synthetic
attcaccaccctgaattgactctcttccgggcgctatcatgccataccgcgaaaggttttgcgccattcgatggtgtccgggatctcgacgctctcccttatgcgactcctgcattaggaaattaatacgactcactataggggaattgtgagcggataacaattcccctgtagaaataattttgtttaactttaataaggagatataccatgggtgaactgccgagtaggtagctgataacgcgcgtggacgctgggtgtttacttcggtctggtgaactgccgagtaggtagctgataacggatccgaattcgagcgaaggagatatacatatgtttttgcaaagacctaaaccttacagcgatgaaagtttagaaagtttctttatccgagtggctaacaaaaatggctacggtgatgtccatcgcttcctagaagccactaaacgattccttcaagacattgaccataatggctatcaaacctttccgactgatataactcggataaacccatactcagctaaaaacagttccagcgcacgaactgcgtcattcctgaaacttgcacaattgacatttaatgaaccgccagagctacttgggttggcaattaacagaacaaacatgaaatactcgccgtcaactagcgcggttgttagaggtgcagaagtctttcctcgcagtttactacggacgcactccatcccctgctgtcctttgtgtctgcgagaaaatggctacgcctcctacctttggcactttcaggggtacgaatactgccacagccataacgtacctttaattaccacttgtagctgtggtaaggagtttgactaccgagtatctgggttaaagggcatttgctgcaaatgcaaggagcctatcaccttaaccagcagggagaacggtcatgaggcagcgtgtactgtttcaaactggcttgctggccatgaatctaaacctctgccaaatcttcctaaaagctaccgatggggtttagttcattggtggatgggtattaaagatagcgagttcgatcacttttcgttcgttcaatttttctcaaactggccaaggtcattccactcgataatcgaagatgaagtagagttcaaccttgagcatgctgttgtcagcacgtctgaattacgactaaaagatcttcttggtcgattgtttttcggttcaattcggttacctgagcggaatcttcaacacaatatcatccttggtgagcttctctgctatttagaaaatcgtttatggcaagacaagggattaatcgccaacctcaaaatgaacgcgttagaggcgactgtaatgttaaattgtagcctcgatcagattgcatcaatggttgaacaacgcatcttgaagccaaatcgaaaaagcaagcccaacagccctcttgatgttaccgattatctatttcatttcggcgatattttctgtctttggttagctgagttccaaagcgatgagtttaaccgttcgttttatgtgtcgaggtggtaaatgcaaactctgaaagaactaatcgcatccaatcctgacgacttaacaactgaacttaagagagcatttcgtccactcacaccgcatattgcaattgatggtaatgaacttgacgcactgacgatattagtcaatttaaccgataagactgatgatcagaaagacctgctcgatcgagccaaatgcaagcaaaaacttcgagatgaaaaatggtgggctagctgcataaattgcgttaattacagacaaagccataacccaaaattcccggatatacgttctgaaggcgtgattcgaacccaagccctgggtgaattaccgagtttcctactctcgtcctcaaaaatcccaccataccattggtcatatagccatgattcaaaatacgtcaacaaaagcgcattcctcaccaatgagttttgttgggatggtgagatctcatgtttgggtgagcttcttaaagatgcagatcacccactttggaatactttgaaaaagttaggttgttctcaaaaaacttgcaaagcaatggcaaaacaactagctgatattactctcacgactatcaatgtcacactcgcaccaaattacctgactcaaatatctctccccgatagtgatacatcctacatttcactctctcctgttgcatcgctatcgatgcaaagccactttcatcagaggctccaagatgaaaatcggcatagcgcgataacgcggtttagccgaactaccaacatgggggtcactgcgatgacatgtggcggcgcatttagaatgttaaagtctggcgctaagttttccagcccccctcatcaccgattaaacagtaaacgaagttggttgacgtcagagcatgttcagtcattaaaacagtaccagcgcctcaacaaaagcctcatacctgaaaactctcggattgcactccgtagaaaatacaaaatcgagcttcaaaatatggtcagatcttggtttgcaatgcaagaccatacccttgattcgaacatacttatccaacatttgaatcatgacctatcttacttaggagccacaaaacgttttgcatacgatccagcgatgaccaagctctttactgagcttttgaaacgagagttatcaaattcaatcaataatggtgagcaacacactaatggatcgtttttagtcctaccgaatatcagggtttgtggcgcaacagctttaagctccccggtaacggtggggattccatcacttacagctttctttggcttcgttcacgcatttgaacggaatataaatcgcaccacctcatcgtttcgtgttgaatcctttgcgatatgcgtccatcaactacatgtcgagaagcgaggtttgacagcagagtttgtggaaaaaggcgacgggactatatccgctcccgcgacccgggatgactggcagtgtgatgtcgtatttagccttattttgaacaccaactttgctcaacatattgaccaagatacgttagttacatcactaccaaagcgattggctcggggttcagcaaaaattgcgattgatgactttaaacatatcaactcattctcgacattagaaacagcgatcgaatctctgccaatagaagctggtaggtggttatcactttacgcacagtcaaacaataatctaagtgatctattagcagccatgacagaggaccatcagctcatggcaagctgcgtcggttaccacttgttagaagagcccaaagataaaccaaactccctcagaggttacaaacacgctatcgccgagtgcatcattggactcattaactcaatcacctttagctcagagactgatcccaacacaatcttttggtcgctaaagaactatcaaaactacctagtggtacagccaaggagtatcaacgatgaaactaccgacaaatctagcctatgagcgctctatcgacccatcagatgtctgtttttttgtcgtctggcccgatgatagaaaaacacctttaacctacaattctcgtactctgctcgggcaaatggaagcggcatcattagcctatgatgtctcaggtcaaccaataaaaagtgccaccgctgaggcgttagctcaagggaaccctcatcaagttgatttctgccacgttccatacggtgcgagtcatattgaatgcagtttctccgtctcgttttcttctgaactacgtcaaccatataagtgtaactcaagcaaagttaaacaaacgctagtgcaattagtcgagctctacgaaacgaaaatcggctggactgagctagcaacccgatatttgatgaacatttgcaacggtaaatggctgtggaaaaatacccgtaaagcctattgctggaacattgtacttacaccttggccttggaacggggaaaaggttggatttgaagatattcgtactaactacacctcacggcaagactttaaaaataataaaaattggtctgctatagttgaaatgatcaaaaccgcattttctagtactgatgggctggcgatatttgaagtcagggccaccttgcacttgccaacgaatgctatggtgcggccaagccaagttttcacagaaaaagaaagtggcagtaaaagtaaatctaaaactcaaaacagtcgagtttttcagagtacaactattgatggtgaacgatcgccaatactaggggcctttaaaacgggagcagctattgcaaccattgacgactggtatcctgaagccactgagccactaagggtcggacggtttggggttcatcgcgaagatgtcacttgctaccgtcatccgtctaccggaaaagattttttctcgatattacaacaagcagagcactatattgaagtgttgagcgccaacaaaactcccgctcaagaaactatcaacgacatgcactttttaatggctaacctgattaagggtgggatgttccagcataaaggagactgactgtgaaatggtattataagacaatcacctttctgccagagttgtgcaacaacgagtcactggctgcaaagtgtctccgcgttctgcatggatttaactatcagtatgagacacgaaatatcggcgtttcatttccgctttggtgtgatgcaacggttggaaaaaagatttcatttgtcagcaagaacaagatagaactcgacttactacttaaacaacactatttcgtccaaatggaacaacttcaatactttcatatatccaacactgttctcgtcccagaagattgtacatacgtttcctttagacgctgtcaatctatagataagctcacagcagcagggctggcaaggaaaatcagacgcctggagaaacgtgctctatctagaggcgagcaatttgacccatcatcttttgctcaaaaagagcatactgcaatagcgcactaccactcacttggggagtccagcaaacagacgaaccgcaactttcgactcaatatcaggatgctctcggagcaaccccgtgaggggaactcgatttttagtagctatggcttatcaaattcagaaaactcgtttcagcctgtacccttaatctgacctttaataaggagatataccatggcgacaagtttacctacgccctcagcaattacgacttcggcgttagagtatgcattccatactcccgctcgcaatctaacgaaatctcgcggaaaaaacattcatcgttatgtcagtgtaaagatgagtaagaggattacggtagaatctactctagagtgtgatgcctgctatcactttgattttgagccaagtattgttcgcttttgcgctcaaccgattcgatttttatattatctcaatggtcagtctcactcctatgttcctgactttctagttcaatttgataccaacgagtttgttctatatgaagtaaagtcagcttatgctaagaacaaacctgattttgatgttgaatgggaggcgaaagtaaaagcagcaactgaactagggctagaattggagcttgttgaagagagtgatattagggatacggttgtattaaataatcttaagcgcatgcatcgttatgcttcgaaagatgagctgaataacgtacataactctctcttaaaaataataaagtacaatggcgcccaatctgcaagatgcttgggagaacagttgggtttaaaaggccgaactgttttaccaattttgtgcgatttgctgtcaaggtgtttactcgatacacgtttggataagcctctatctcttgaatctcgatttgagttggccagttatggctaagaaagggttctcaagtttccatagaaaagcagtctcttcccaagatacgcttgaatcgatagagcttgtctctagcgctaattgtctagaaagtgttacgtatcaagatatatcagcatttcccgaaacaattgcggtagagattaatttccgattaagcattcttcgctttttagcgcgaaagtgcgaaaccattgtggccaaatcaattgaaccacatcgtgtagagctacagcaaaactatagtagaaaaatacccagtgcaataacgatatatcgatggtggcttgcttttcgaaaatcagactacaaccccattagcttagcacctaatatcaaggatagaggtaatagagagacaaaagtgtcaacagttgttgattctattatggaacaggcagttgaaagagttatatctggacgaaaagtcaatgttagctctgcatataaacgtgttcgacgaaaagttcgtcaatacaatctaactcatggaacgaaatacacgtatcctaagtacgaatctgtaagaaagcgagtaaaaaagaaaaccccatttgagttattagccgcagggaaaggggagagagtagctaagagagagtttcgccgaatgggaaaaaagatcctcacgtctagcgtgctagagagggttgaaatagatcacactgtcgttgacctttttgcagtacacgaagagtatcgaatcccattgggccgaccttggcttactcaattggttgattgttacagtaaagctgtaatcggtttttatttaggtttcgagcctcctagctatgtgtcggtttcccttgcacttaagaatgcaatacaacgcaaagatgacttaatctcctcgtatgaatcgatcgagaatgaatggctatgttatggcatcccagacctactcgtaactgataatggtaaagagtttttgtcgaaagcatttgatcaagcatgtgaatcactattgatcaatgtgcatcaaaataaagttgagacgcccgacaacaaacctcatgttgaacgtaactacgggactattaatacttctctgttagacgatttacctgggaaatccttcagccagtaccttcaaagagaagggtacgactctgtgggagaagctacccttacactcaatgagattagagaaatttacttaatttggttggtggatatttatcataaaaaacccaatcagagaggcactaattgtcctaatgttgcgtggaaaaagggttgtcaagaatgggaaccagaggagttctctggttctaaagacgaattagactttaaatttgctattgttgattacaaacaacttactaaagtagggataactgtctacaaagaactgagttatagcaatgaccgtttagctgaatatagagggaagaaaggaaaccataaagttcagttcaagtataaccctgagtgtatggcagttatttgggtgttggatgaggatatgaatgagtactttacagttaatgcgattgactacgaatatgcaagtagagtatcactttggcaacataaatataacatgaaatatcaagcagaactaaattcagcagaatatgatgaggacaaggaaattgatgcagaaataaaaattgaagaaatcgcagatcgttcaattgttaagactaacaaaatcagagctcggaggcgtggcgctaggcatcaagagaatagcgcaagggctaagtcaatcagtaatgcgaacccggcctcgatacaaaaacatgaagatgaaatcgttagtgcagataatgacgattgggatattgattatgtctgagaaatcgtcaaatgagtgaaacgcgtgaggctcgtatatcaagagctaaaagggcatttgtatccacaccgagcgttaggaaaatcttgagttacatggatagatgtagagatctatcagacctagagtctgagcctacatgcatgatggtctatggtgcttcgggtgtaggtaaaacgaccgtcatcaagaaatacttaaatcaaaacagaagagagtccgaagccgggggcgatataataccggttttgcatattgagttgccagacaatgcgaagccagtagatgcagcaagggaattgctggttgaaatgggtgacccgctagcactttatgaaactgacttagctagattgacgaaaagactgactgaattaatccctgcggtcggcgtgaagctgattattatcgatgagttccaacatttggtggaagaaaggtcaaatcgggttcttacccaagtaggtaattggctaaaaatgatacttaacaaaacgaaatgtccaattgttatatttggtatgccatactcaaaagttgtactgcaagcaaactcgcaacttcacgggcgattttccattcaggttgaactgcgcccctttagctaccagggaggtagaggtgtatttaaaacttttttggaataccttgataaagccctaccttttgaaaaacaggctggcttagccaacgaaagtttgcagaaaaaattgtatgcattctctcagggaaacatgcgttcgttgagaaaccttatttatcaagcatctatcgaagcaattgataatcagcatgagacgataaccgaagaagatttcgtttttgcatcgaagttgacatcgggcgataaacccaactcatggaaaaatccttttgaggagggtgttgaggtaacagaagatatgttacgaccgccaccaaaagatattggttgggaggactatttgagacattcaaccccgagagtgagtaaaccaggtagaaataaaaactttttcgaataacctaggctgctgcgctgctgccaccgctgagcaataactagcataaccccttggggcctctaaacgggtcttgaggggttttttgctgaaacctcaggcatttgagaagcacacggtcacactgcttccggtagtcaataaaccggtaaaccagcaatagacataagcggctatttaacgaccctgccctgaaccgacgaccgggtcatcgtggccggatcttgcggcccctcggcttgaacgaattgttagacattatttgccgactaccttggtgatctcgcctttcacgtagtggacaaattcttccaactgatctgcgcgcgaggccaagcgatcttcttcttgtccaagataagcctgtctagcttcaagtatgacgggctgatactgggccggcaggcgctccattgcccagtcggcagcgacatccttcggcgcgattttgccggttactgcgctgtaccaaatgcgggacaacgtaagcactacatttcgctcatcgccagcccagtcgggcggcgagttccatagcgttaaggtttcatttagcgcctcaaatagatcctgttcaggaaccggatcaaagagttcctccgccgctggacctaccaaggcaacgctatgttctcttgcttttgtcagcaagatagccagatcaatgtcgatcgtggctggctcgaagatacctgcaagaatgtcattgcgctgccattctccaaattgcagttcgcgcttagctggataacgccacggaatgatgtcgtcgtgcacaacaatggtgacttctacagcgcggagaatctcgctctctccaggggaagccgaagtttccaaaaggtcgttgatcaaagctcgccgcgttgtttcatcaagccttacggtcaccgtaaccagcaaatcaatatcactgtgtggcttcaggccgccatccactgcggagccgtacaaatgtacggccagcaacgtcggttcgagatggcgctcgatgacgccaactacctctgatagttgagtcgatacttcggcgatcaccgcttccctcatactcttcctttttcaatattattgaagcatttatcagggttattgtctcatgagcggatacatatttgaatgtatttagaaaaataaacaaatagctagctcactcggtcgctacgctccgggcgtgagactgcggcgggcgctgcggacacatacaaagttacccacagattccgtggataagcaggggactaacatgtgaggcaaaacagcagggccgcgccggtggcgtttttccataggctccgccctcctgccagagttcacataaacagacgcttttccggtgcatctgtgggagccgtgaggctcaaccatgaatctgacagtacgggcgaaacccgacaggacttaaagatccccaccgtttccggcgggtcgctccctcttgcgctctcctgttccgaccctgccgtttaccggatacctgttccgcctttctcccttacgggaagtgtggcgctttctcatagctcacacactggtatctcggctcggtgtaggtcgttcgctccaagctgggctgtaagcaagaactccccgttcagcccgactgctgcgccttatccggtaactgttcacttgagtccaacccggaaaagcacggtaaaacgccactggcagcagccattggtaactgggagttcgcagaggatttgtttagctaaacacgcggttgctcttgaagtgtgcgccaaagtccggctacactggaaggacagatttggttgctgtgctctgcgaaagccagttaccacggttaagcagttccccaactgacttaaccttcgatcaaaccacctccccaggtggttttttcgtttacagggcaaaagattacgcgcagaaaaaaaggatctcaagaagatcctttgatcttttctactgaaccgctctagatttcagtgcaatttatctcttcaaatgtagcacctgaagtcagccccatacgatataagttgtaattctcatgttagtcatgccccgcgcccaccggaaggagctgactgggttgaaggctctcaagggcatcggtcgagatcccggtgcctaatgagtgagctaacttacattaattgcgttgcgctcactgcccgctttccagtcgggaaacctgtcgtgccagctgcattaatgaatcggccaacgcgcggggagaggcggtttgcgtattgggcgccagggtggtttttcttttcaccagtgagacgggcaacagctgattgcccttcaccgcctggccctgagagagttgcagcaagcggtccacgctggtttgccccagcaggcgaaaatcctgtttgatggtggttaacggcgggatataacatgagctgtcttcggtatcgtcgtatcccactaccgagatgtccgcaccaacgcgcagcccggactcggtaatggcgcgcattgcgcccagcgccatctgatcgttggcaaccagcatcgcagtgggaacgatgccctcattcagcatttgcatggtttgttgaaaaccggacatggcactccagtcgccttcccgttccgctatcggctgaatttgattgcgagtgagatatttatgccagccagccagacgcagacgcgccgagacagaacttaatgggcccgctaacagcgcgatttgctggtgacccaatgcgaccagatgctccacgcccagtcgcgtaccgtcttcatgggagaaaataatactgttgatgggtgtctggtcagagacatcaagaaataacgccggaacattagtgcaggcagcttccacagcaatggcatcctggtcatccagcggatagttaatgatcagcccactgacgcgttgcgcgagaagattgtgcaccgccgctttacaggcttcgacgccgcttcgttctaccatcgacaccaccacgctggcacccagttgatcggcgcgagatttaatcgccgcgacaatttgcgacggcgcgtgcagggccagactggaggtggcaacgccaatcagcaacgactgtttgcccgccagttgttgtgccacgcggttgggaatgtaattcagctccgccatcgccgcttccactttttcccgcgttttcgcagaaacgtggctggcctggttcaccacgcgggaaacggtctgataagagacaccggcatactctgcgacatcgtataacgttactggtttcac

SEQ ID NO: 54 - DNA, 11812 bp, artificial sequence
  Synthetic
attcaccaccctgaattgactctcttccgggcgctatcatgccataccgcgaaaggttttgcgccattcgatggtgtccgggatctcgacgctctcccttatgcgactcctgcattaggaaattaatacgactcactataggggaattgtgagcggataacaattcccctgtagaaataattttgtttaactttaataaggagatataccatgggtgaactgccgagtaggtagctgataactgggaggattcataaagcattgtttgttggctgtgaactgccgagtaggtagctgataacggatccgaattcgagcgaaggagatatacatatgtttttgcaaagacctaaaccttacagcgatgaaagtttagaaagtttctttatccgagtggctaacaaaaatggctacggtgatgtccatcgcttcctagaagccactaaacgattccttcaagacattgaccataatggctatcaaacctttccgactgatataactcggataaacccatactcagctaaaaacagttccagcgcacgaactgcgtcattcctgaaacttgcacaattgacatttaatgaaccgccagagctacttgggttggcaattaacagaacaaacatgaaatactcgccgtcaactagcgcggttgttagaggtgcagaagtctttcctcgcagtttactacggacgcactccatcccctgctgtcctttgtgtctgcgagaaaatggctacgcctcctacctttggcactttcaggggtacgaatactgccacagccataacgtacctttaattaccacttgtagctgtggtaaggagtttgactaccgagtatctgggttaaagggcatttgctgcaaatgcaaggagcctatcaccttaaccagcagggagaacggtcatgaggcagcgtgtactgtttcaaactggcttgctggccatgaatctaaacctctgccaaatcttcctaaaagctaccgatggggtttagttcattggtggatgggtattaaagatagcgagttcgatcacttttcgttcgttcaatttttctcaaactggccaaggtcattccactcgataatcgaagatgaagtagagttcaaccttgagcatgctgttgtcagcacgtctgaattacgactaaaagatcttcttggtcgattgtttttcggttcaattcggttacctgagcggaatcttcaacacaatatcatccttggtgagcttctctgctatttagaaaatcgtttatggcaagacaagggattaatcgccaacctcaaaatgaacgcgttagaggcgactgtaatgttaaattgtagcctcgatcagattgcatcaatggttgaacaacgcatcttgaagccaaatcgaaaaagcaagcccaacagccctcttgatgttaccgattatctatttcatttcggcgatattttctgtctttggttagctgagttccaaagcgatgagtttaaccgttcgttttatgtgtcgaggtggtaaatgcaaactctgaaagaactaatcgcatccaatcctgacgacttaacaactgaacttaagagagcatttcgtccactcacaccgcatattgcaattgatggtaatgaacttgacgcactgacgatattagtcaatttaaccgataagactgatgatcagaaagacctgctcgatcgagccaaatgcaagcaaaaacttcgagatgaaaaatggtgggctagctgcataaattgcgttaattacagacaaagccataacccaaaattcccggatatacgttctgaaggcgtgattcgaacccaagccctgggtgaattaccgagtttcctactctcgtcctcaaaaatcccaccataccattggtcatatagccatgattcaaaatacgtcaacaaaagcgcattcctcaccaatgagttttgttgggatggtgagatctcatgtttgggtgagcttcttaaagatgcagatcacccactttggaatactttgaaaaagttaggttgttctcaaaaaacttgcaaagcaatggcaaaacaactagctgatattactctcacgactatcaatgtcacactcgcaccaaattacctgactcaaatatctctccccgatagtgatacatcctacatttcactctctcctgttgcatcgctatcgatgcaaagccactttcatcagaggctccaagatgaaaatcggcatagcgcgataacgcggtttagccgaactaccaacatgggggtcactgcgatgacatgtggcggcgcatttagaatgttaaagtctggcgctaagttttccagcccccctcatcaccgattaaacagtaaacgaagttggttgacgtcagagcatgttcagtcattaaaacagtaccagcgcctcaacaaaagcctcatacctgaaaactctcggattgcactccgtagaaaatacaaaatcgagcttcaaaatatggtcagatcttggtttgcaatgcaagaccatacccttgattcgaacatacttatccaacatttgaatcatgacctatcttacttaggagccacaaaacgttttgcatacgatccagcgatgaccaagctctttactgagcttttgaaacgagagttatcaaattcaatcaataatggtgagcaacacactaatggatcgtttttagtcctaccgaatatcagggtttgtggcgcaacagctttaagctccccggtaacggtggggattccatcacttacagctttctttggcttcgttcacgcatttgaacggaatataaatcgcaccacctcatcgtttcgtgttgaatcctttgcgatatgcgtccatcaactacatgtcgagaagcgaggtttgacagcagagtttgtggaaaaaggcgacgggactatatccgctcccgcgacccgggatgactggcagtgtgatgtcgtatttagccttattttgaacaccaactttgctcaacatattgaccaagatacgttagttacatcactaccaaagcgattggctcggggttcagcaaaaattgcgattgatgactttaaacatatcaactcattctcgacattagaaacagcgatcgaatctctgccaatagaagctggtaggtggttatcactttacgcacagtcaaacaataatctaagtgatctattagcagccatgacagaggaccatcagctcatggcaagctgcgtcggttaccacttgttagaagagcccaaagataaaccaaactccctcagaggttacaaacacgctatcgccgagtgcatcattggactcattaactcaatcacctttagctcagagactgatcccaacacaatcttttggtcgctaaagaactatcaaaactacctagtggtacagccaaggagtatcaacgatgaaactaccgacaaatctagcctatgagcgctctatcgacccatcagatgtctgtttttttgtcgtctggcccgatgatagaaaaacacctttaacctacaattctcgtactctgctcgggcaaatggaagcggcatcattagcctatgatgtctcaggtcaaccaataaaaagtgccaccgctgaggcgttagctcaagggaaccctcatcaagttgatttctgccacgttccatacggtgcgagtcatattgaatgcagtttctccgtctcgttttcttctgaactacgtcaaccatataagtgtaactcaagcaaagttaaacaaacgctagtgcaattagtcgagctctacgaaacgaaaatcggctggactgagctagcaacccgatatttgatgaacatttgcaacggtaaatggctgtggaaaaatacccgtaaagcctattgctggaacattgtacttacaccttggccttggaacggggaaaaggttggatttgaagatattcgtactaactacacctcacggcaagactttaaaaataataaaaattggtctgctatagttgaaatgatcaaaaccgcattttctagtactgatgggctggcgatatttgaagtcagggccaccttgcacttgccaacgaatgctatggtgcggccaagccaagttttcacagaaaaagaaagtggcagtaaaagtaaatctaaaactcaaaacagtcgagtttttcagagtacaactattgatggtgaacgatcgccaatactaggggcctttaaaacgggagcagctattgcaaccattgacgactggtatcctgaagccactgagccactaagggtcggacggtttggggttcatcgcgaagatgtcacttgctaccgtcatccgtctaccggaaaagattttttctcgatattacaacaagcagagcactatattgaagtgttgagcgccaacaaaactcccgctcaagaaactatcaacgacatgcactttttaatggctaacctgattaagggtgggatgttccagcataaaggagactgactgtgaaatggtattataagacaatcacctttctgccagagttgtgcaacaacgagtcactggctgcaaagtgtctccgcgttctgcatggatttaactatcagtatgagacacgaaatatcggcgtttcatttccgctttggtgtgatgcaacggttggaaaaaagatttcatttgtcagcaagaacaagatagaactcgacttactacttaaacaacactatttcgtccaaatggaacaacttcaatactttcatatatccaacactgttctcgtcccagaagattgtacatacgtttcctttagacgctgtcaatctatagataagctcacagcagcagggctggcaaggaaaatcagacgcctggagaaacgtgctctatctagaggcgagcaatttgacccatcatcttttgctcaaaaagagcatactgcaatagcgcactaccactcacttggggagtccagcaaacagacgaaccgcaactttcgactcaatatcaggatgctctcggagcaaccccgtgaggggaactcgatttttagtagctatggcttatcaaattcagaaaactcgtttcagcctgtacccttaatctgacctttaataaggagatataccatggcgacaagtttacctacgccctcagcaattacgacttcggcgttagagtatgcattccatactcccgctcgcaatctaacgaaatctcgcggaaaaaacattcatcgttatgtcagtgtaaagatgagtaagaggattacggtagaatctactctagagtgtgatgcctgctatcactttgattttgagccaagtattgttcgcttttgcgctcaaccgattcgatttttatattatctcaatggtcagtctcactcctatgttcctgactttctagttcaatttgataccaacgagtttgttctatatgaagtaaagtcagcttatgctaagaacaaacctgattttgatgttgaatgggaggcgaaagtaaaagcagcaactgaactagggctagaattggagcttgttgaagagagtgatattagggatacggttgtattaaataatcttaagcgcatgcatcgttatgcttcgaaagatgagctgaataacgtacataactctctcttaaaaataataaagtacaatggcgcccaatctgcaagatgcttgggagaacagttgggtttaaaaggccgaactgttttaccaattttgtgcgatttgctgtcaaggtgtttactcgatacacgtttggataagcctctatctcttgaatctcgatttgagttggccagttatggctaagaaagggttctcaagtttccatagaaaagcagtctcttcccaagatacgcttgaatcgatagagcttgtctctagcgctaattgtctagaaagtgttacgtatcaagatatatcagcatttcccgaaacaattgcggtagagattaatttccgattaagcattcttcgctttttagcgcgaaagtgcgaaaccattgtggccaaatcaattgaaccacatcgtgtagagctacagcaaaactatagtagaaaaatacccagtgcaataacgatatatcgatggtggcttgcttttcgaaaatcagactacaaccccattagcttagcacctaatatcaaggatagaggtaatagagagacaaaagtgtcaacagttgttgattctattatggaacaggcagttgaaagagttatatctggacgaaaagtcaatgttagctctgcatataaacgtgttcgacgaaaagttcgtcaatacaatctaactcatggaacgaaatacacgtatcctaagtacgaatctgtaagaaagcgagtaaaaaagaaaaccccatttgagttattagccgcagggaaaggggagagagtagctaagagagagtttcgccgaatgggaaaaaagatcctcacgtctagcgtgctagagagggttgaaatagatcacactgtcgttgacctttttgcagtacacgaagagtatcgaatcccattgggccgaccttggcttactcaattggttgattgttacagtaaagctgtaatcggtttttatttaggtttcgagcctcctagctatgtgtcggtttcccttgcacttaagaatgcaatacaacgcaaagatgacttaatctcctcgtatgaatcgatcgagaatgaatggctatgttatggcatcccagacctactcgtaactgataatggtaaagagtttttgtcgaaagcatttgatcaagcatgtgaatcactattgatcaatgtgcatcaaaataaagttgagacgcccgacaacaaacctcatgttgaacgtaactacgggactattaatacttctctgttagacgatttacctgggaaatccttcagccagtaccttcaaagagaagggtacgactctgtgggagaagctacccttacactcaatgagattagagaaatttacttaatttggttggtggatatttatcataaaaaacccaatcagagaggcactaattgtcctaatgttgcgtggaaaaagggttgtcaagaatgggaaccagaggagttctctggttctaaagacgaattagactttaaatttgctattgttgattacaaacaacttactaaagtagggataactgtctacaaagaactgagttatagcaatgaccgtttagctgaatatagagggaagaaaggaaaccataaagttcagttcaagtataaccctgagtgtatggcagttatttgggtgttggatgaggatatgaatgagtactttacagttaatgcgattgactacgaatatgcaagtagagtatcactttggcaacataaatataacatgaaatatcaagcagaactaaattcagcagaatatgatgaggacaaggaaattgatgcagaaataaaaattgaagaaatcgcagatcgttcaattgttaagactaacaaaatcagagctcggaggcgtggcgctaggcatcaagagaatagcgcaagggctaagtcaatcagtaatgcgaacccggcctcgatacaaaaacatgaagatgaaatcgttagtgcagataatgacgattgggatattgattatgtctgagaaatcgtcaaatgagtgaaacgcgtgaggctcgtatatcaagagctaaaagggcatttgtatccacaccgagcgttaggaaaatcttgagttacatggatagatgtagagatctatcagacctagagtctgagcctacatgcatgatggtctatggtgcttcgggtgtaggtaaaacgaccgtcatcaagaaatacttaaatcaaaacagaagagagtccgaagccgggggcgatataataccggttttgcatattgagttgccagacaatgcgaagccagtagatgcagcaagggaattgctggttgaaatgggtgacccgctagcactttatgaaactgacttagctagattgacgaaaagactgactgaattaatccctgcggtcggcgtgaagctgattattatcgatgagttccaacatttggtggaagaaaggtcaaatcgggttcttacccaagtaggtaattggctaaaaatgatacttaacaaaacgaaatgtccaattgttatatttggtatgccatactcaaaagttgtactgcaagcaaactcgcaacttcacgggcgattttccattcaggttgaactgcgcccctttagctaccagggaggtagaggtgtatttaaaacttttttggaataccttgataaagccctaccttttgaaaaacaggctggcttagccaacgaaagtttgcagaaaaaattgtatgcattctctcagggaaacatgcgttcgttgagaaaccttatttatcaagcatctatcgaagcaattgataatcagcatgagacgataaccgaagaagatttcgtttttgcatcgaagttgacatcgggcgataaacccaactcatggaaaaatccttttgaggagggtgttgaggtaacagaagatatgttacgaccgccaccaaaagatattggttgggaggactatttgagacattcaaccccgagagtgagtaaaccaggtagaaataaaaactttttcgaataacctaggctgctgcgctgctgccaccgctgagcaataactagcataaccccttggggcctctaaacgggtcttgaggggttttttgctgaaacctcaggcatttgagaagcacacggtcacactgcttccggtagtcaataaaccggtaaaccagcaatagacataagcggctatttaacgaccctgccctgaaccgacgaccgggtcatcgtggccggatcttgcggcccctcggcttgaacgaattgttagacattatttgccgactaccttggtgatctcgcctttcacgtagtggacaaattcttccaactgatctgcgcgcgaggccaagcgatcttcttcttgtccaagataagcctgtctagcttcaagtatgacgggctgatactgggccggcaggcgctccattgcccagtcggcagcgacatccttcggcgcgattttgccggttactgcgctgtaccaaatgcgggacaacgtaagcactacatttcgctcatcgccagcccagtcgggcggcgagttccatagcgttaaggtttcatttagcgcctcaaatagatcctgttcaggaaccggatcaaagagttcctccgccgctggacctaccaaggcaacgctatgttctcttgcttttgtcagcaagatagccagatcaatgtcgatcgtggctggctcgaagatacctgcaagaatgtcattgcgctgccattctccaaattgcagttcgcgcttagctggataacgccacggaatgatgtcgtcgtgcacaacaatggtgacttctacagcgcggagaatctcgctctctccaggggaagccgaagtttccaaaaggtcgttgatcaaagctcgccgcgttgtttcatcaagccttacggtcaccgtaaccagcaaatcaatatcactgtgtggcttcaggccgccatccactgcggagccgtacaaatgtacggccagcaacgtcggttcgagatggcgctcgatgacgccaactacctctgatagttgagtcgatacttcggcgatcaccgcttccctcatactcttcctttttcaatattattgaagcatttatcagggttattgtctcatgagcggatacatatttgaatgtatttagaaaaataaacaaatagctagctcactcggtcgctacgctccgggcgtgagactgcggcgggcgctgcggacacatacaaagttacccacagattccgtggataagcaggggactaacatgtgaggcaaaacagcagggccgcgccggtggcgtttttccataggctccgccctcctgccagagttcacataaacagacgcttttccggtgcatctgtgggagccgtgaggctcaaccatgaatctgacagtacgggcgaaacccgacaggacttaaagatccccaccgtttccggcgggtcgctccctcttgcgctctcctgttccgaccctgccgtttaccggatacctgttccgcctttctcccttacgggaagtgtggcgctttctcatagctcacacactggtatctcggctcggtgtaggtcgttcgctccaagctgggctgtaagcaagaactccccgttcagcccgactgctgcgccttatccggtaactgttcacttgagtccaacccggaaaagcacggtaaaacgccactggcagcagccattggtaactgggagttcgcagaggatttgtttagctaaacacgcggttgctcttgaagtgtgcgccaaagtccggctacactggaaggacagatttggttgctgtgctctgcgaaagccagttaccacggttaagcagttccccaactgacttaaccttcgatcaaaccacctccccaggtggttttttcgtttacagggcaaaagattacgcgcagaaaaaaaggatctcaagaagatcctttgatcttttctactgaaccgctctagatttcagtgcaatttatctcttcaaatgtagcacctgaagtcagccccatacgatataagttgtaattctcatgttagtcatgccccgcgcccaccggaaggagctgactgggttgaaggctctcaagggcatcggtcgagatcccggtgcctaatgagtgagctaacttacattaattgcgttgcgctcactgcccgctttccagtcgggaaacctgtcgtgccagctgcattaatgaatcggccaacgcgcggggagaggcggtttgcgtattgggcgccagggtggtttttcttttcaccagtgagacgggcaacagctgattgcccttcaccgcctggccctgagagagttgcagcaagcggtccacgctggtttgccccagcaggcgaaaatcctgtttgatggtggttaacggcgggatataacatgagctgtcttcggtatcgtcgtatcccactaccgagatgtccgcaccaacgcgcagcccggactcggtaatggcgcgcattgcgcccagcgccatctgatcgttggcaaccagcatcgcagtgggaacgatgccctcattcagcatttgcatggtttgttgaaaaccggacatggcactccagtcgccttcccgttccgctatcggctgaatttgattgcgagtgagatatttatgccagccagccagacgcagacgcgccgagacagaacttaatgggcccgctaacagcgcgatttgctggtgacccaatgcgaccagatgctccacgcccagtcgcgtaccgtcttcatgggagaaaataatactgttgatgggtgtctggtcagagacatcaagaaataacgccggaacattagtgcaggcagcttccacagcaatggcatcctggtcatccagcggatagttaatgatcagcccactgacgcgttgcgcgagaagattgtgcaccgccgctttacaggcttcgacgccgcttcgttctaccatcgacaccaccacgctggcacccagttgatcggcgcgagatttaatcgccgcgacaatttgcgacggcgcgtgcagggccagactggaggtggcaacgccaatcagcaacgactgtttgcccgccagttgttgtgccacgcggttgggaatgtaattcagctccgccatcgccgcttccactttttcccgcgttttcgcagaaacgtggctggcctggttcaccacgcgggaaacggtctgataagagacaccggcatactctgcgacatcgtataacgttactggtttcac

SEQ ID NO: 55 - DNA, 12828 bp, artificial sequence
  Synthetic
aacgtggctggcctggttcaccacgcgggaaacggtctgataagagacaccggcatactctgcgacatcgtataacgttactggtttcacattcaccaccctgaattgactctcttccgggcgctatcatgccataccgcgaaaggttttgcgccattcgatggtgtccgggatctcgacgctctcccttatgcgactcctgcattaggaatggataaccgtattaccgcctttgagtgagctgataccgctcgccgcagccgaacgaccgagcgcagcgagtcagtgagcgaggacacaagctttgacagctagctcagtcctaggtataatactagcgtcgacgtggagatataccatgggtgaactgccgagtaggtagctgataactgggaggattcataaagcattgtttgttggctgtgaactgccgagtaggtagctgataacggatccgaattcgagcgaaggagatatacatatgtttttgcaaagacctaaaccttacagcgatgaaagtttagaaagtttctttatccgagtggctaacaaaaatggctacggtgatgtccatcgcttcctagaagccactaaacgattccttcaagacattgaccataatggctatcaaacctttccgactgatataactcggataaacccatactcagctaaaaacagttccagcgcacgaactgcgtcattcctgaaacttgcacaattgacatttaatgaaccgccagagctacttgggttggcaattaacagaacaaacatgaaatactcgccgtcaactagcgcggttgttagaggtgcagaagtctttcctcgcagtttactacggacgcactccatcccctgctgtcctttgtgtctgcgagaaaatggctacgcctcctacctttggcactttcaggggtacgaatactgccacagccataacgtacctttaattaccacttgtagctgtggtaaggagtttgactaccgagtatctgggttaaagggcatttgctgcaaatgcaaggagcctatcaccttaaccagcagggagaacggtcatgaggcagcgtgtactgtttcaaactggcttgctggccatgaatctaaacctctgccaaatcttcctaaaagctaccgatggggtttagttcattggtggatgggtattaaagatagcgagttcgatcacttttcgttcgttcaatttttctcaaactggccaaggtcattccactcgataatcgaagatgaagtagagttcaaccttgagcatgctgttgtcagcacgtctgaattacgactaaaagatcttcttggtcgattgtttttcggttcaattcggttacctgagcggaatcttcaacacaatatcatccttggtgagcttctctgctatttagaaaatcgtttatggcaagacaagggattaatcgccaacctcaaaatgaacgcgttagaggcgactgtaatgttaaattgtagcctcgatcagattgcatcaatggttgaacaacgcatcttgaagccaaatcgaaaaagcaagcccaacagccctcttgatgttaccgattatctatttcatttcggcgatattttctgtctttggttagctgagttccaaagcgatgagtttaaccgttcgttttatgtgtcgaggtggtaaatgcaaactctgaaagaactaatcgcatccaatcctgacgacttaacaactgaacttaagagagcatttcgtccactcacaccgcatattgcaattgatggtaatgaacttgacgcactgacgatattagtcaatttaaccgataagactgatgatcagaaagacctgctcgatcgagccaaatgcaagcaaaaacttcgagatgaaaaatggtgggctagctgcataaattgcgttaattacagacaaagccataacccaaaattcccggatatacgttctgaaggcgtgattcgaacccaagccctgggtgaattaccgagtttcctactctcgtcctcaaaaatcccaccataccattggtcatatagccatgattcaaaatacgtcaacaaaagcgcattcctcaccaatgagttttgttgggatggtgagatctcatgtttgggtgagcttcttaaagatgcagatcacccactttggaatactttgaaaaagttaggttgttctcaaaaaacttgcaaagcaatggcaaaacaactagctgatattactctcacgactatcaatgtcacactcgcaccaaattacctgactcaaatatctctccccgatagtgatacatcctacatttcactctctcctgttgcatcgctatcgatgcaaagccactttcatcagaggctccaagatgaaaatcggcatagcgcgataacgcggtttagccgaactaccaacatgggggtcactgcgatgacatgtggcggcgcatttagaatgttaaagtctggcgctaagttttccagcccccctcatcaccgattaaacagtaaacgaagttggttgacgtcagagcatgttcagtcattaaaacagtaccagcgcctcaacaaaagcctcatacctgaaaactctcggattgcactccgtagaaaatacaaaatcgagcttcaaaatatggtcagatcttggtttgcaatgcaagaccatacccttgattcgaacatacttatccaacatttgaatcatgacctatcttacttaggagccacaaaacgttttgcatacgatccagcgatgaccaagctctttactgagcttttgaaacgagagttatcaaattcaatcaataatggtgagcaacacactaatggatcgtttttagtcctaccgaatatcagggtttgtggcgcaacagctttaagctccccggtaacggtggggattccatcacttacagctttctttggcttcgttcacgcatttgaacggaatataaatcgcaccacctcatcgtttcgtgttgaatcctttgcgatatgcgtccatcaactacatgtcgagaagcgaggtttgacagcagagtttgtggaaaaaggcgacgggactatatccgctcccgcgacccgggatgactggcagtgtgatgtcgtatttagccttattttgaacaccaactttgctcaacatattgaccaagatacgttagttacatcactaccaaagcgattggctcggggttcagcaaaaattgcgattgatgactttaaacatatcaactcattctcgacattagaaacagcgatcgaatctctgccaatagaagctggtaggtggttatcactttacgcacagtcaaacaataatctaagtgatctattagcagccatgacagaggaccatcagctcatggcaagctgcgtcggttaccacttgttagaagagcccaaagataaaccaaactccctcagaggttacaaacacgctatcgccgagtgcatcattggactcattaactcaatcacctttagctcagagactgatcccaacacaatcttttggtcgctaaagaactatcaaaactacctagtggtacagccaaggagtatcaacgatgaaactaccgacaaatctagcctatgagcgctctatcgacccatcagatgtctgtttttttgtcgtctggcccgatgatagaaaaacacctttaacctacaattctcgtactctgctcgggcaaatggaagcggcatcattagcctatgatgtctcaggtcaaccaataaaaagtgccaccgctgaggcgttagctcaagggaaccctcatcaagttgatttctgccacgttccatacggtgcgagtcatattgaatgcagtttctccgtctcgttttcttctgaactacgtcaaccatataagtgtaactcaagcaaagttaaacaaacgctagtgcaattagtcgagctctacgaaacgaaaatcggctggactgagctagcaacccgatatttgatgaacatttgcaacggtaaatggctgtggaaaaatacccgtaaagcctattgctggaacattgtacttacaccttggccttggaacggggaaaaggttggatttgaagatattcgtactaactacacctcacggcaagactttaaaaataataaaaattggtctgctatagttgaaatgatcaaaaccgcattttctagtactgatgggctggcgatatttgaagtcagggccaccttgcacttgccaacgaatgctatggtgcggccaagccaagttttcacagaaaaagaaagtggcagtaaaagtaaatctaaaactcaaaacagtcgagtttttcagagtacaactattgatggtgaacgatcgccaatactaggggcctttaaaacgggagcagctattgcaaccattgacgactggtatcctgaagccactgagccactaagggtcggacggtttggggttcatcgcgaagatgtcacttgctaccgtcatccgtctaccggaaaagattttttctcgatattacaacaagcagagcactatattgaagtgttgagcgccaacaaaactcccgctcaagaaactatcaacgacatgcactttttaatggctaacctgattaagggtgggatgttccagcataaaggagactgactgtgaaatggtattataagacaatcacctttctgccagagttgtgcaacaacgagtcactggctgcaaagtgtctccgcgttctgcatggatttaactatcagtatgagacacgaaatatcggcgtttcatttccgctttggtgtgatgcaacggttggaaaaaagatttcatttgtcagcaagaacaagatagaactcgacttactacttaaacaacactatttcgtccaaatggaacaacttcaatactttcatatatccaacactgttctcgtcccagaagattgtacatacgtttcctttagacgctgtcaatctatagataagctcacagcagcagggctggcaaggaaaatcagacgcctggagaaacgtgctctatctagaggcgagcaatttgacccatcatcttttgctcaaaaagagcatactgcaatagcgcactaccactcacttggggagtccagcaaacagacgaaccgcaactttcgactcaatatcaggatgctctcggagcaaccccgtgaggggaactcgatttttagtagctatggcttatcaaattcagaaaactcgtttcagcctgtacccttaatctgacctttaataaggagatataccatggcgacaagtttacctacgccctcagcaattacgacttcggcgttagagtatgcattccatactcccgctcgcaatctaacgaaatctcgcggaaaaaacattcatcgttatgtcagtgtaaagatgagtaagaggattacggtagaatctactctagagtgtgatgcctgctatcactttgattttgagccaagtattgttcgcttttgcgctcaaccgattcgatttttatattatctcaatggtcagtctcactcctatgttcctgactttctagttcaatttgataccaacgagtttgttctatatgaagtaaagtcagcttatgctaagaacaaacctgattttgatgttgaatgggaggcgaaagtaaaagcagcaactgaactagggctagaattggagcttgttgaagagagtgatattagggatacggttgtattaaataatcttaagcgcatgcatcgttatgcttcgaaagatgagctgaataacgtacataactctctcttaaaaataataaagtacaatggcgcccaatctgcaagatgcttgggagaacagttgggtttaaaaggccgaactgttttaccaattttgtgcgatttgctgtcaaggtgtttactcgatacacgtttggataagcctctatctcttgaatctcgatttgagttggccagttatggctaagaaagggttctcaagtttccatagaaaagcagtctcttcccaagatacgcttgaatcgatagagcttgtctctagcgctaattgtctagaaagtgttacgtatcaagatatatcagcatttcccgaaacaattgcggtagagattaatttccgattaagcattcttcgctttttagcgcgaaagtgcgaaaccattgtggccaaatcaattgaaccacatcgtgtagagctacagcaaaactatagtagaaaaatacccagtgcaataacgatatatcgatggtggcttgcttttcgaaaatcagactacaaccccattagcttagcacctaatatcaaggatagaggtaatagagagacaaaagtgtcaacagttgttgattctattatggaacaggcagttgaaagagttatatctggacgaaaagtcaatgttagctctgcatataaacgtgttcgacgaaaagttcgtcaatacaatctaactcatggaacgaaatacacgtatcctaagtacgaatctgtaagaaagcgagtaaaaaagaaaaccccatttgagttattagccgcagggaaaggggagagagtagctaagagagagtttcgccgaatgggaaaaaagatcctcacgtctagcgtgctagagagggttgaaatagatcacactgtcgttgacctttttgcagtacacgaagagtatcgaatcccattgggccgaccttggcttactcaattggttgattgttacagtaaagctgtaatcggtttttatttaggtttcgagcctcctagctatgtgtcggtttcccttgcacttaagaatgcaatacaacgcaaagatgacttaatctcctcgtatgaatcgatcgagaatgaatggctatgttatggcatcccagacctactcgtaactgataatggtaaagagtttttgtcgaaagcatttgatcaagcatgtgaatcactattgatcaatgtgcatcaaaataaagttgagacgcccgacaacaaacctcatgttgaacgtaactacgggactattaatacttctctgttagacgatttacctgggaaatccttcagccagtaccttcaaagagaagggtacgactctgtgggagaagctacccttacactcaatgagattagagaaatttacttaatttggttggtggatatttatcataaaaaacccaatcagagaggcactaattgtcctaatgttgcgtggaaaaagggttgtcaagaatgggaaccagaggagttctctggttctaaagacgaattagactttaaatttgctattgttgattacaaacaacttactaaagtagggataactgtctacaaagaactgagttatagcaatgaccgtttagctgaatatagagggaagaaaggaaaccataaagttcagttcaagtataaccctgagtgtatggcagttatttgggtgttggatgaggatatgaatgagtactttacagttaatgcgattgactacgaatatgcaagtagagtatcactttggcaacataaatataacatgaaatatcaagcagaactaaattcagcagaatatgatgaggacaaggaaattgatgcagaaataaaaattgaagaaatcgcagatcgttcaattgttaagactaacaaaatcagagctcggaggcgtggcgctaggcatcaagagaatagcgcaagggctaagtcaatcagtaatgcgaacccggcctcgatacaaaaacatgaagatgaaatcgttagtgcagataatgacgattgggatattgattatgtctgagaaatcgtcaaatgagtgaaacgcgtgaggctcgtatatcaagagctaaaagggcatttgtatccacaccgagcgttaggaaaatcttgagttacatggatagatgtagagatctatcagacctagagtctgagcctacatgcatgatggtctatggtgcttcgggtgtaggtaaaacgaccgtcatcaagaaatacttaaatcaaaacagaagagagtccgaagccgggggcgatataataccggttttgcatattgagttgccagacaatgcgaagccagtagatgcagcaagggaattgctggttgaaatgggtgacccgctagcactttatgaaactgacttagctagattgacgaaaagactgactgaattaatccctgcggtcggcgtgaagctgattattatcgatgagttccaacatttggtggaagaaaggtcaaatcgggttcttacccaagtaggtaattggctaaaaatgatacttaacaaaacgaaatgtccaattgttatatttggtatgccatactcaaaagttgtactgcaagcaaactcgcaacttcacgggcgattttccattcaggttgaactgcgcccctttagctaccagggaggtagaggtgtatttaaaacttttttggaataccttgataaagccctaccttttgaaaaacaggctggcttagccaacgaaagtttgcagaaaaaattgtatgcattctctcagggaaacatgcgttcgttgagaaaccttatttatcaagcatctatcgaagcaattgataatcagcatgagacgataaccgaagaagatttcgtttttgcatcgaagttgacatcgggcgataaacccaactcatggaaaaatccttttgaggagggtgttgaggtaacagaagatatgttacgaccgccaccaaaagatattggttgggaggactatttgagacattcaaccccgagagtgagtaaaccaggtagaaataaaaactttttcgaataacctaggctgctgcgctgctgccaccgctgagcaataactagcataaccccttggggcctctaaacgggtcttgaggggttttttgctgaaacctcaggcatttgttgttgatacaaccataaaatgataattacacccataaattgataattatcacacccataaattgatattgcctcttcatggtctaaacttcagtaagtttacgacattttcctcgaggtcatttccggggatccatggagaaaaaaatcactggatataccaccgttgatatatcccaatggcatcgtaaagaacattttgaggcatttcagtcagttgctcaatgtacctataaccagaccgttcagctggatattacggcctttttaaagaccgtaaagaaaaataagcacaagttttatccggcctttattcacattcttgcccgcctgatgaatgctcatccggagttccgtatggcaatgaaagacggtgagctggtgatatgggatagtgttcacccttgttacaccgttttccatgagcaaactgaaacgttttcatcgctctggagtgaataccacgacgatttccggcagtttctacacatatattcgcaagatgtggcgtgttacggtgaaaacctggcctatttccctaaagggtttattgagaatatgtttttcgtctcagccaatccctgggtgagtttcaccagttttgatttaaacgtggccaatatggacaacttcttcgcccccgttttcactatgggcaaatattatacgcaaggcgacaaggtgctgatgccgctggcgattcaggttcatcatgccgtttgtgatggcttccatgtcggcagaatgcttaatgaattacaacagtactgcgatgagtggcagggcggggcgtaatttttttaaggcagttattggtgcccttctagagtccttactgcagtagttttgctgaaatactcgattcacaaaaatatcaacttatggttgttttgtgagatatcaatatatggttgttttgtggttaagttgctgattataaataattattaaatatcactttatggttgcatcaacaggtaccgagctcgaattcactggccgtcgttttacaacgtcgtgactgggaaaaccctggcgttacccaacttaatcgccttgctatcgtggccggatcttgcggcccctcggcttgaacgaattgttagacattatttgccgactaccttggtgatctcgcctttcacgtagtggacaaattcttccaactgatctgcgcgcgaggccaagcgatcttcttcttgtccaagataagcctgtctagcttcaagtatgacgggctgatactgggccggcaggcgctccattgcccagtcggcagcgacatccttcggcgcgattttgccggttactgcgctgtaccaaatgcgggacaacgtaagcactacatttcgctcatcgccagcccagtcgggcggcgagttccatagcgttaaggtttcatttagcgcctcaaatagatcctgttcaggaaccggatcaaagagttcctccgccgctggacctaccaaggcaacgctatgttctcttgcttttgtcagcaagatagccagatcaatgtcgatcgtggctggctcgaagatacctgcaagaatgtcattgcgctgccattctccaaattgcagttcgcgcttagctggataacgccacggaatgatgtcgtcgtgcacaacaatggtgacttctacagcgcggagaatctcgctctctccaggggaagccgaagtttccaaaaggtcgttgatcaaagctcgccgcgttgtttcatcaagccttacggtcaccgtaaccagcaaatcaatatcactgtgtggcttcaggccgccatccactgcggagccgtacaaatgtacggccagcaacgtcggttcgagatggcgctcgatgacgccaactacctctgatagttgagtcgatacttcggcgatcaccgcttccctcatactcttcctttttcaatattattgaagcatttatcagggttattgtctcatgagcggatacatatttgaatgtatttagaaaaataaacaaatagctagctcactcggtcgctacgctccgggcgtgagactgcggcgggcgctgcggacacatacaaagttacccacagattccgtggataagcaggggactaacatgtgaggcaaaacagcagggccgcgccggtggcgtttttccataggctccgccctcctgccagagttcacataaacagacgcttttccggtgcatctgtgggagccgtgaggctcaaccatgaatctgacagtacgggcgaaacccgacaggacttaaagatccccaccgtttccggcgggtcgctccctcttgcgctctcctgttccgaccctgccgtttaccggatacctgttccgcctttctcccttacgggaagtgtggcgctttctcatagctcacacactggtatctcggctcggtgtaggtcgttcgctccaagctgggctgtaagcaagaactccccgttcagcccgactgctgcgccttatccggtaactgttcacttgagtccaacccggaaaagcacggtaaaacgccactggcagcagccattggtaactgggagttcgcagaggatttgtttagctaaacacgcggttgctcttgaagtgtgcgccaaagtccggctacactggaaggacagatttggttgctgtgctctgcgaaagccagttaccacggttaagcagttccccaactgacttaaccttcgatcaaaccacctccccaggtggttttttcgtttacagggcaaaagattacgcgcagaaaaaaaggatctcaagaagatcctttgatcttttctactgaaccgctctagatttcagtgcaatttatctcttcaaatgtagcacctgaagtcagccccatacgatataagttgtaattctcatgttagtcatgccccgcgcccaccggaaggagctgactgggttgaaggctctcaagggcatcggtcgagatcccggtgcctaatgagtgagctaacttacattaattgcgttgcgctcactgcccgctttccagtcgggaaacctgtcgtgccagctgcattaatgaatcggccaacgcgcggggagaggcggtttgcgtattgggcgccagggtggtttttcttttcaccagtgagacgggcaacagctgattgcccttcaccgcctggccctgagagagttgcagcaagcggtccacgctggtttgccccagcaggcgaaaatcctgtttgatggtggttaacggcgggatataacatgagctgtcttcggtatcgtcgtatcccactaccgagatgtccgcaccaacgcgcagcccggactcggtaatggcgcgcattgcgcccagcgccatctgatcgttggcaaccagcatcgcagtgggaacgatgccctcattcagcatttgcatggtttgttgaaaaccggacatggcactccagtcgccttcccgttccgctatcggctgaatttgattgcgagtgagatatttatgccagccagccagacgcagacgcgccgagacagaacttaatgggcccgctaacagcgcgatttgctggtgacccaatgcgaccagatgctccacgcccagtcgcgtaccgtcttcatgggagaaaataatactgttgatgggtgtctggtcagagacatcaagaaataacgccggaacattagtgcaggcagcttccacagcaatggcatcctggtcatccagcggatagttaatgatcagcccactgacgcgttgcgcgagaagattgtgcaccgccgctttacaggcttcgacgccgcttcgttctaccatcgacaccaccacgctggcacccagttgatcggcgcgagatttaatcgccgcgacaatttgcgacggcgcgtgcagggccagactggaggtggcaacgccaatcagcaacgactgtttgcccgccagttgttgtgccacgcggttgggaatgtaattcagctccgccatcgccgcttccactttttcccgcgttttcgcaga

SEQ ID NO: 56 - DNA, 3910 bp, artificial sequence
  Synthetic
gcgcccaatacgcaaaccgcctctccccgcgcgttggccgattcattaatgcagctggcacgacaggtttcccgactggaaagcgggcagtgagcgcaacgcaattaatgtgagttagctcactcattaggcaccccaggctttacactttatgcttccggctcgtatgttgtgtggaattgtgagcggataacaatttcacacaggaaacagctatgaccatgattacgccaagcttgcatgcctgcagcaaagactacctacttaaatgaaccgcaaatgtacattcgcaaattaaatgtcgtaattcgcaaatttgtgtcgtttttcgcaaattaatgtcgtttagaatagtttgtctcatcaattcaattataggaacttttcgcaaattaatgtcgtcctgtttctccatttagtgtcgattaacaaattaatgtcgctgttaacgaattaatgtcgtcgaattagttccaactaacgttaacaaattaatgtcgtctaacataatgtcttgctaggatccatggagaaaaaaatcactggatataccaccgttgatatatcccaatggcatcgtaaagaacattttgaggcatttcagtcagttgctcaatgtacctataaccagaccgttcagctggatattacggcctttttaaagaccgtaaagaaaaataagcacaagttttatccggcctttattcacattcttgcccgcctgatgaatgctcatccggagttccgtatggcaatgaaagacggtgagctggtgatatgggatagtgttcacccttgttacaccgttttccatgagcaaactgaaacgttttcatcgctctggagtgaataccacgacgatttccggcagtttctacacatatattcgcaagatgtggcgtgttacggtgaaaacctggcctatttccctaaagggtttattgagaatatgtttttcgtctcagccaatccctgggtgagtttcaccagttttgatttaaacgtggccaatatggacaacttcttcgcccccgttttcactatgggcaaatattatacgcaaggcgacaaggtgctgatgccgctggcgattcaggttcatcatgccgtttgtgatggcttccatgtcggcagaatgcttaatgaattacaacagtactgcgatgagtggcagggcggggcgtaatttttttaaggcagttattggtgcccttctagaaaaaccactgattaacactttaggtactaaagtaccactaatgtggcaaaaatgcgacatctaatttgcgaaacaggcaaatcttaataaacgacatttaatttgcgaaaataggatttgcgacatctaatttgcgaaacaggcaaattactcagttttatggataaatagcttgtaagtcctacgcaataaagatctcagctattagaagtaattgcgacactaatttgcgaattgcgacatataatttgcgaatgtacaccaaccccaagcattggtaccgagctcgaattcactggccgtcgttttacaacgtcgtgactgggaaaaccctggcgttacccaacttaatcgccttgcagcacatccccctttcgccagctggcgtaatagcgaagaggcccgcaccgatcgcccttcccaacagttgcgcagcctgaatggcgaatggcgcctgatgcggtattttctccttacgcatctgtgcggtatttcacaccgcatatggtgcactctcagtacaatctgctctgatgccgcatagttaagccagccccgacacccgccaacacccgctgacgcgccctgacgggcttgtctgctcccggcatccgcttacagacaagctgtgaccgtctccgggagctgcatgtgtcagaggttttcaccgtcatcaccgaaacgcgcgagacgaaagggcctcgtgatacgcctatttttataggttaatgtcatgataataatggtttcttagacgtcaggtggcacttttcggggaaatgtgcgcggaacccctatttgtttatttttctaaatacattcaaatatgtatccgctcatgagacaataaccctgataaatgcttcaataatattgaaaaaggaagagtatgagtattcaacatttccgtgtcgcccttattcccttttttgcggcattttgccttcctgtttttgctcacccagaaacgctggtgaaagtaaaagatgctgaagatcagttgggtgcacgagtgggttacatcgaactggatctcaacagcggtaagatccttgagagttttcgccccgaagaacgttttccaatgatgagcacttttaaagttctgctatgtggcgcggtattatcccgtattgacgccgggcaagagcaactcggtcgccgcatacactattctcagaatgacttggttgagtactcaccagtcacagaaaagcatcttacggatggcatgacagtaagagaattatgcagtgctgccataaccatgagtgataacactgcggccaacttacttctgacaacgatcggaggaccgaaggagctaaccgcttttttgcacaacatgggggatcatgtaactcgccttgatcgttgggaaccggagctgaatgaagccataccaaacgacgagcgtgacaccacgatgcctgtagcaatggcaacaacgttgcgcaaactattaactggcgaactacttactctagcttcccggcaacaattaatagactggatggaggcggataaagttgcaggaccacttctgcgctcggcccttccggctggctggtttattgctgataaatctggagccggtgagcgtgggtctcgcggtatcattgcagcactggggccagatggtaagccctcccgtatcgtagttatctacacgacggggagtcaggcaactatggatgaacgaaatagacagatcgctgagataggtgcctcactgattaagcattggtaactgtcagaccaagtttactcatatatactttagattgatttaaaacttcatttttaatttaaaaggatctaggtgaagatcctttttgataatctcatgaccaaaatcccttaacgtgagttttcgttccactgagcgtcagaccccgtagaaaagatcaaaggatcttcttgagatcctttttttctgcgcgtaatctgctgcttgcaaacaaaaaaaccaccgctaccagcggtggtttgtttgccggatcaagagctaccaactctttttccgaaggtaactggcttcagcagagcgcagataccaaatactgttcttctagtgtagccgtagttaggccaccacttcaagaactctgtagcaccgcctacatacctcgctctgctaatcctgttaccagtggctgctgccagtggcgataagtcgtgtcttaccgggttggactcaagacgatagttaccggataaggcgcagcggtcgggctgaacggggggttcgtgcacacagcccagcttggagcgaacgacctacaccgaactgagatacctacagcgtgagctatgagaaagcgccacgcttcccgaagggagaaaggcggacaggtatccggtaagcggcagggtcggaacaggagagcgcacgagggagcttccagggggaaacgcctggtatctttatagtcctgtcgggtttcgccacctctgacttgagcgtcgatttttgtgatgctcgtcaggggggcggagcctatggaaaaacgccagcaacgcggcctttttacggttcctggccttttgctggccttttgctcacatgttctttcctgcgttatcccctgattctgtggataaccgtattaccgcctttgagtgagctgataccgctcgccgcagccgaacgaccgagcgcagcgagtcagtgagcgaggaagcggaaga

SEQ ID NO: 57 - DNA, 9133 bp, artificial sequence
  Synthetic
ttttctactgaaccgctctagatttcagtgcaatttatctcttcaaatgtagcacctgaagtcagccccatacgatataagttgtaattctcatgttagtcatgccccgcgcccaccggaaggagctgactgggttgaaggctctcaagggcatcggtcgagatcccggtgcctaatgagtgagctaacttacattaattgcgttgcgctcactgcccgctttccagtcgggaaacctgtcgtgccagctgcattaatgaatcggccaacgcgcggggagaggcggtttgcgtattgggcgccagggtggtttttcttttcaccagtgagacgggcaacagctgattgcccttcaccgcctggccctgagagagttgcagcaagcggtccacgctggtttgccccagcaggcgaaaatcctgtttgatggtggttaacggcgggatataacatgagctgtcttcggtatcgtcgtatcccactaccgagatgtccgcaccaacgcgcagcccggactcggtaatggcgcgcattgcgcccagcgccatctgatcgttggcaaccagcatcgcagtgggaacgatgccctcattcagcatttgcatggtttgttgaaaaccggacatggcactccagtcgccttcccgttccgctatcggctgaatttgattgcgagtgagatatttatgccagccagccagacgcagacgcgccgagacagaacttaatgggcccgctaacagcgcgatttgctggtgacccaatgcgaccagatgctccacgcccagtcgcgtaccgtcttcatgggagaaaataatactgttgatgggtgtctggtcagagacatcaagaaataacgccggaacattagtgcaggcagcttccacagcaatggcatcctggtcatccagcggatagttaatgatcagcccactgacgcgttgcgcgagaagattgtgcaccgccgctttacaggcttcgacgccgcttcgttctaccatcgacaccaccacgctggcacccagttgatcggcgcgagatttaatcgccgcgacaatttgcgacggcgcgtgcagggccagactggaggtggcaacgccaatcagcaacgactgtttgcccgccagttgttgtgccacgcggttgggaatgtaattcagctccgccatcgccgcttccactttttcccgcgttttcgcagaaacgtggctggcctggttcaccacgcgggaaacggtctgataagagacaccggcatactctgcgacatcgtataacgttactggtttcacattcaccaccctgaattgactctcttccgggcgctatcatgccataccgcgaaaggttttgcgccattcgatggtgtccgggatctcgacgctctcccttatgcgactcctgctaatacgactcactatagggtactaatagcgccgcagttcatgctctttaagagtctctgtactgtggaaaatctgggttagtttgacggttggaaaaccgttttgctttctgaccctggtagctgcccgcttctcatgctctgacttttcacgttatgtggaaaaagtaacgtaatttcgttagttaagacttaccgtaaaaagtcagttctgatgctgctgtcgcaagacaggataggtgcgctcccagcaaaaggagtatgtcttgaaaaagactagccgttctagtaacggtgcggattaccgcagtggtggctactgaatcacccccttcgtcgggggaaccctccaaaaggtgggttgaaagcgagaccctcgacgagggtctcggtaccctagcataaccccttggggcctctaaacgggtcttgaggggttttttggtcgaacagaaagtaatcgtattgtacacggccgcataatcgaaattaatacgactcactataggggaattgtgagcggataacaattccccatcttagtatattagttaagtataagaaggagatatacatatgagcacaatcacgattcaatgccgcctagttgcagaagaagcgaccctgcgctacttttgggaacttatggctgagaagaatacgccactcattaatgaattgttggagcagttaggacaacatccagattttgatacttgggtacaagcaggcaagatgcctgaaaagacagttgagaacttgtgcaagtccctagaagatcgagaaccttttgcaaatcagcccggtcgttttcgtacttcggcagttgctctggtaaagtacatttacaaatcctggtttgcgttacaaaaacgtcgggcggacagactagaaggtaaagagcgctggttaaagatgctcaaaagtgatgtggaactggaacgagaaagcaactgtagtttggatattattcgagctaaagctggggaaattcttgctaaagttactgaggggtgcgctccgagcaatcaaacatcctctaagagaaaaaagaagaaaactaaaaaaagccaagcgacaaaagatctccctacgcttttcgagattatattaaaggcttacgaacaagctgaagaaagcctgacacgagctgcccttgcttatctccttaaaaatgactgtgaagtcagtgaagttgatgaagattcagagaaatttaaaaagcgtcggcgtaaaaaggaaatagaaattgaacgtttaagaaatcaactgaaaagtcggatacctaaaggtcgcgatttaaccggagataagtggttgaaaacgctagaagaagccacccgaaatgttcctgaaaatgaggatgaggcaaaggcttggcaagcccaactcttgagagaagctagttctgttccttttcctgtagcttatgaaactagtgaagatatgacttggtttaccaacgagcaaggtcgaatctttgtttactttaatggttcagccaaacataaatttcaagtttattgcgatcgccgtcaacttcattggtttcaacgttttgtagaggactttcaaatcaagaaaaatggtgataaaaaaggtagcgaaaaggagtaccctgctgggttattgacgctttgttccactcgtctgagatggaaagaaagcgcggaaaaaggagatccttggaatgttcatcgcctaattctttcttgcactatcgatacacgcttatggacacttgaaggaacggaacaggtgcgagctgaaaagatcgctcaggttgaaaaaactattagcaagcgggagcaagaagttaatctgagtaagactcaacttgagcgtttacaagccaagcacagtgagagggagagattgaacaacatttttcccaaccgccctagcaagcccagttaccggggtaaatctcatattgcgatcggtgtaagtttcagtttggaaaacccagccactgttgccgtcgtagatgttgcaaccaagaaagtccttacttaccgcagtttcaaacaattactcggagataactacaaccttgcaaaccggctgcggcaacaaaagcaacgtctttctcacgaacgtcacaaagctcagaaacaaggcgcaccaaattcatttggagactcagagttagggcagtatgtagacagattgcttgcaaaatcgattgtcgcgatcgcaaaaacttatcaagctagtagtattgtcttgcctaaacttcgctatatgagggaaatcatacataatgaagttcaagctaaagccgaaaaaaagattccaggatataaagaaggtcaaaaacaatatgccaaacagtatcggataagcgttcatcaatggagttataatagattatcacagattcttgaaagccaagctacaaaagctggaatttctattgaacgtggatcgcaagtaatccaaggtagctcccaagaacaagcacgagatttagctttatttgcctataacgaacgccaacttagtctgggttagtaacctttaataaggagatataccatgggcttagacgaagaatttgagttcactgaggaattgacgcaagctccagatgttattgtgcttgacaagagtcattttgtggtagacccatcccaaattattctgcaaacatcggataagcataaactgagatttaatcttatcaagtggttcgctgaatcccccaacattactattaaatctcagagaaaacaggcagtcgtagatacccttggtgtttctactcggcaggtggagcgtctcctcaagcaatatcataatggtgagttatcagagacagcgggagtacaacgctcagataaggggaaacttcgcatcagccaatactgggaagattatattaaaacaacttatgaaaaaagtctgaaagataaacatccaatgttgccagcagctgtcgtgcgggaagtgaagcgacacgcgatcgttgacctcggactgaaaccaggagattatccccatccagccaccatctatagaaatttagctcctttaatcgagcaacacacgcggaagaaaaaagttagaaatccgggttcgggatcttggctgaccgttgtcacgcgagatggtcagctactgaaggctgactttagtaaccaaattatccaatgcgaccataccgagctggatattcatatagttgatagtcatggcagtttattgtctgaccgtccttggctaactactgttgtcgatacttattcaagttgcattcttggttttcatttatggatcaaacaaccaggttctacggaggtagctcttgccttgagacacgccattctacccaaaaattatccagaggactacaaacttggcaaagtttgggaaatatatggacctccttttcagtatttttttactgatggtggaaaagattttaattcaaagcatctaaaagccattggtaagaaattaggatttcagtgcgaactacgcaatcgcccgccccaaggtggaattgtagaacgtctttttaaaaccattaatactcaagttcttaaagagcttcccggttacacgggggcaaacgttcaagaacgcccgaaaaatgcagagaaagaagcctgtttaacaatacaggatttggataaaattctagccagcttcttttgtgatatttataaccacgaaccctatcccaaggagcctcgcaacacgagatttgaacgctggtttaaaggtatggggggaaaattacccgaacctttggacgagcgagaattggatatttgtttgatgaaagaagcacaacgagttgttcaagctcatggtagcatacagtttgaaaacctaatttatcgaggagaagctctgaaggcatatagaggtgaatacgtcaccctaagatacgatcccgaccatgtcctgactttatatgtctatagttgcgaagctgatgataatgcagaagagttcttgggctatgctcacgctataaacatggatactcatgacttgagtatagaagaattgaaaactctcaataaagaacgaagtaaagctcgtagcgatcattacaactatgatgctttattagcattgggtaaacgcaaagaacttgtagaagaaagaaaacaagacaagaaagcaaaaaggcaatcagagcaaaaacgtctccgcactgcttccaagaaaaactcaaatgttattgaactacgcaaaagtagagcttcgagttcttcaagtaaagatgaccgacaggaaattttaccagagagagtttctagggacgaactaaagccggagaaaacagaactgaaatatgaggaaaatctgttagcacagaccgatactcaaaaacaggagagacataagttagttgtctctgaccgtaaaaaaaatttaaagaacatttggtgataaaggaggtaaataatggccatatctcaactggcaacccaaccatttgtcgaagtcttacctccagagttagatagcaaagctcaaattgctaaaactattgatattgaggagcttttcagaattaattttatcacaaccgatcggtcatcagaatgtttcagatggttagatgagctgcgtatcctgaaacaatgcggtcggatcattggaccaagaaatgtaggcaaaagccgagcagtgcttcactatcgtaatgaggataaaaaacgagtttcttatgtaaaggcttggtcggcatcgagttctaaacgtctattttcacaaatcttaaaggatattaaccatgctgcatcaacaggtaaacgacaggatttacgtccaagattagctggtagtcttgaactatttggattagaattggtcattgttgataatgctgaaaatcttcaaaaagaggcgctcttagatttaaagcaactttttgaagaatgccatgttcctattgtcttagttggaggtaaggagttagatgatattttagaagattttgatttgttgactaactttccaacgttatatgagtttgaacgattggaacatgatgattttataaaaacattaaagacaatcgaattggatattttatctcttccagaagcgtctaagttaagtgagggtaacatatttgcaattttagctgagagtacaggtgggaaaataggaattttagtcaagatactaactaaagcagttttacattctcttaaaaagggatttggtaaagttgatgaaagcattttagaaaaaatcgcaagtcgttatggaacaaaatacgttcccattgaaaacaaaaatagaaacgattaatagaggaggatataaatgattgaagatgatgaaattcgtctaaggttgggctatgttgaaccacacccaggtgaaagcatcagtcattatttgggacggcttcgtcgatttaaggctaacagccttccttcaggatatgctctaggaaaaattgcgggtcttgggtctgttctgactcgatgggaaaagttgtacttcaacccatttcccactcaacaagaactagaggcattagcacaagtgattcaagtggaggttgagaaattaagagagatgctacccactaaaggtgtcacaatgatgcctcgacccattcgattatgtgcggcttgctatgcagagtcaccttatcaccggatcgagtggcagtttaaggacaaaatgaagtgcgatcgccatcagttgcgcttattaacaaaatgcacaaactgtcagacaccattccccattcctgctgattgggaaaaaggagaatgctcgcattgttttttgtcttttgctaagatggtgaagtgtcaaaagcgtcgttagtaacctaggctgctgccaccgctgagcaataactagcataaccccttggggcctctaaacgggtcttgaggggttttttgctgaaacctcaggcatttgagaagcacacggtcacactgcttccggtagtcaataaaccggtaaaccagcaatagacataagcggctatttaacgaccctgccctgaaccgacgaccgggtcatcgtggccggatcttgcggcccctcggcttgaacgaattgttagacattatttgccgactaccttggtgatctcgcctttcacgtagtggacaaattcttccaactgatctgcgcgcgaggccaagcgatcttcttcttgtccaagataagcctgtctagcttcaagtatgacgggctgatactgggccggcaggcgctccattgcccagtcggcagcgacatccttcggcgcgattttgccggttactgcgctgtaccaaatgcgggacaacgtaagcactacatttcgctcatcgccagcccagtcgggcggcgagttccatagcgttaaggtttcatttagcgcctcaaatagatcctgttcaggaaccggatcaaagagttcctccgccgctggacctaccaaggcaacgctatgttctcttgcttttgtcagcaagatagccagatcaatgtcgatcgtggctggctcgaagatacctgcaagaatgtcattgcgctgccattctccaaattgcagttcgcgcttagctggataacgccacggaatgatgtcgtcgtgcacaacaatggtgacttctacagcgcggagaatctcgctctctccaggggaagccgaagtttccaaaaggtcgttgatcaaagctcgccgcgttgtttcatcaagccttacggtcaccgtaaccagcaaatcaatatcactgtgtggcttcaggccgccatccactgcggagccgtacaaatgtacggccagcaacgtcggttcgagatggcgctcgatgacgccaactacctctgatagttgagtcgatacttcggcgatcaccgcttccctcatactcttcctttttcaatattattgaagcatttatcagggttattgtctcatgagcggatacatatttgaatgtatttagaaaaataaacaaatagctagctcactcggtcgctacgctccgggcgtgagactgcggcgggcgctgcggacacatacaaagttacccacagattccgtggataagcaggggactaacatgtgaggcaaaacagcagggccgcgccggtggcgtttttccataggctccgccctcctgccagagttcacataaacagacgcttttccggtgcatctgtgggagccgtgaggctcaaccatgaatctgacagtacgggcgaaacccgacaggacttaaagatccccaccgtttccggcgggtcgctccctcttgcgctctcctgttccgaccctgccgtttaccggatacctgttccgcctttctcccttacgggaagtgtggcgctttctcatagctcacacactggtatctcggctcggtgtaggtcgttcgctccaagctgggctgtaagcaagaactccccgttcagcccgactgctgcgccttatccggtaactgttcacttgagtccaacccggaaaagcacggtaaaacgccactggcagcagccattggtaactgggagttcgcagaggatttgtttagctaaacacgcggttgctcttgaagtgtgcgccaaagtccggctacactggaaggacagatttggttgctgtgctctgcgaaagccagttaccacggttaagcagttccccaactgacttaaccttcgatcaaaccacctccccaggtggttttttcgtttacagggcaaaagattacgcgcagaaaaaaaggatctcaagaagatcctttgatc

SEQ ID NO: 58 - DNA, 9133 bp, artificial sequence
  Synthetic
ttttctactgaaccgctctagatttcagtgcaatttatctcttcaaatgtagcacctgaagtcagccccatacgatataagttgtaattctcatgttagtcatgccccgcgcccaccggaaggagctgactgggttgaaggctctcaagggcatcggtcgagatcccggtgcctaatgagtgagctaacttacattaattgcgttgcgctcactgcccgctttccagtcgggaaacctgtcgtgccagctgcattaatgaatcggccaacgcgcggggagaggcggtttgcgtattgggcgccagggtggtttttcttttcaccagtgagacgggcaacagctgattgcccttcaccgcctggccctgagagagttgcagcaagcggtccacgctggtttgccccagcaggcgaaaatcctgtttgatggtggttaacggcgggatataacatgagctgtcttcggtatcgtcgtatcccactaccgagatgtccgcaccaacgcgcagcccggactcggtaatggcgcgcattgcgcccagcgccatctgatcgttggcaaccagcatcgcagtgggaacgatgccctcattcagcatttgcatggtttgttgaaaaccggacatggcactccagtcgccttcccgttccgctatcggctgaatttgattgcgagtgagatatttatgccagccagccagacgcagacgcgccgagacagaacttaatgggcccgctaacagcgcgatttgctggtgacccaatgcgaccagatgctccacgcccagtcgcgtaccgtcttcatgggagaaaataatactgttgatgggtgtctggtcagagacatcaagaaataacgccggaacattagtgcaggcagcttccacagcaatggcatcctggtcatccagcggatagttaatgatcagcccactgacgcgttgcgcgagaagattgtgcaccgccgctttacaggcttcgacgccgcttcgttctaccatcgacaccaccacgctggcacccagttgatcggcgcgagatttaatcgccgcgacaatttgcgacggcgcgtgcagggccagactggaggtggcaacgccaatcagcaacgactgtttgcccgccagttgttgtgccacgcggttgggaatgtaattcagctccgccatcgccgcttccactttttcccgcgttttcgcagaaacgtggctggcctggttcaccacgcgggaaacggtctgataagagacaccggcatactctgcgacatcgtataacgttactggtttcacattcaccaccctgaattgactctcttccgggcgctatcatgccataccgcgaaaggttttgcgccattcgatggtgtccgggatctcgacgctctcccttatgcgactcctgctaatacgactcactatagggtactaatagcgccgcagttcatgctctttaagagtctctgtactgtggaaaatctgggttagtttgacggttggaaaaccgttttgctttctgaccctggtagctgcccgcttctcatgctctgacttttcacgttatgtggaaaaagtaacgtaatttcgttagttaagacttaccgtaaaaagtcagttctgatgctgctgtcgcaagacaggataggtgcgctcccagcaaaaggagtatgtcttgaaaaagactagccgttctagtaacggtgcggattaccgcagtggtggctactgaatcacccccttcgtcgggggaaccctccaaaaggtgggttgaaagcagcgcggctgaaatcatcattagtaccctagcataaccccttggggcctctaaacgggtcttgaggggttttttggtcgaacagaaagtaatcgtattgtacacggccgcataatcgaaattaatacgactcactataggggaattgtgagcggataacaattccccatcttagtatattagttaagtataagaaggagatatacatatgagcacaatcacgattcaatgccgcctagttgcagaagaagcgaccctgcgctacttttgggaacttatggctgagaagaatacgccactcattaatgaattgttggagcagttaggacaacatccagattttgatacttgggtacaagcaggcaagatgcctgaaaagacagttgagaacttgtgcaagtccctagaagatcgagaaccttttgcaaatcagcccggtcgttttcgtacttcggcagttgctctggtaaagtacatttacaaatcctggtttgcgttacaaaaacgtcgggcggacagactagaaggtaaagagcgctggttaaagatgctcaaaagtgatgtggaactggaacgagaaagcaactgtagtttggatattattcgagctaaagctggggaaattcttgctaaagttactgaggggtgcgctccgagcaatcaaacatcctctaagagaaaaaagaagaaaactaaaaaaagccaagcgacaaaagatctccctacgcttttcgagattatattaaaggcttacgaacaagctgaagaaagcctgacacgagctgcccttgcttatctccttaaaaatgactgtgaagtcagtgaagttgatgaagattcagagaaatttaaaaagcgtcggcgtaaaaaggaaatagaaattgaacgtttaagaaatcaactgaaaagtcggatacctaaaggtcgcgatttaaccggagataagtggttgaaaacgctagaagaagccacccgaaatgttcctgaaaatgaggatgaggcaaaggcttggcaagcccaactcttgagagaagctagttctgttccttttcctgtagcttatgaaactagtgaagatatgacttggtttaccaacgagcaaggtcgaatctttgtttactttaatggttcagccaaacataaatttcaagtttattgcgatcgccgtcaacttcattggtttcaacgttttgtagaggactttcaaatcaagaaaaatggtgataaaaaaggtagcgaaaaggagtaccctgctgggttattgacgctttgttccactcgtctgagatggaaagaaagcgcggaaaaaggagatccttggaatgttcatcgcctaattctttcttgcactatcgatacacgcttatggacacttgaaggaacggaacaggtgcgagctgaaaagatcgctcaggttgaaaaaactattagcaagcgggagcaagaagttaatctgagtaagactcaacttgagcgtttacaagccaagcacagtgagagggagagattgaacaacatttttcccaaccgccctagcaagcccagttaccggggtaaatctcatattgcgatcggtgtaagtttcagtttggaaaacccagccactgttgccgtcgtagatgttgcaaccaagaaagtccttacttaccgcagtttcaaacaattactcggagataactacaaccttgcaaaccggctgcggcaacaaaagcaacgtctttctcacgaacgtcacaaagctcagaaacaaggcgcaccaaattcatttggagactcagagttagggcagtatgtagacagattgcttgcaaaatcgattgtcgcgatcgcaaaaacttatcaagctagtagtattgtcttgcctaaacttcgctatatgagggaaatcatacataatgaagttcaagctaaagccgaaaaaaagattccaggatataaagaaggtcaaaaacaatatgccaaacagtatcggataagcgttcatcaatggagttataatagattatcacagattcttgaaagccaagctacaaaagctggaatttctattgaacgtggatcgcaagtaatccaaggtagctcccaagaacaagcacgagatttagctttatttgcctataacgaacgccaacttagtctgggttagtaacctttaataaggagatataccatgggcttagacgaagaatttgagttcactgaggaattgacgcaagctccagatgttattgtgcttgacaagagtcattttgtggtagacccatcccaaattattctgcaaacatcggataagcataaactgagatttaatcttatcaagtggttcgctgaatcccccaacattactattaaatctcagagaaaacaggcagtcgtagatacccttggtgtttctactcggcaggtggagcgtctcctcaagcaatatcataatggtgagttatcagagacagcgggagtacaacgctcagataaggggaaacttcgcatcagccaatactgggaagattatattaaaacaacttatgaaaaaagtctgaaagataaacatccaatgttgccagcagctgtcgtgcgggaagtgaagcgacacgcgatcgttgacctcggactgaaaccaggagattatccccatccagccaccatctatagaaatttagctcctttaatcgagcaacacacgcggaagaaaaaagttagaaatccgggttcgggatcttggctgaccgttgtcacgcgagatggtcagctactgaaggctgactttagtaaccaaattatccaatgcgaccataccgagctggatattcatatagttgatagtcatggcagtttattgtctgaccgtccttggctaactactgttgtcgatacttattcaagttgcattcttggttttcatttatggatcaaacaaccaggttctacggaggtagctcttgccttgagacacgccattctacccaaaaattatccagaggactacaaacttggcaaagtttgggaaatatatggacctccttttcagtatttttttactgatggtggaaaagattttaattcaaagcatctaaaagccattggtaagaaattaggatttcagtgcgaactacgcaatcgcccgccccaaggtggaattgtagaacgtctttttaaaaccattaatactcaagttcttaaagagcttcccggttacacgggggcaaacgttcaagaacgcccgaaaaatgcagagaaagaagcctgtttaacaatacaggatttggataaaattctagccagcttcttttgtgatatttataaccacgaaccctatcccaaggagcctcgcaacacgagatttgaacgctggtttaaaggtatggggggaaaattacccgaacctttggacgagcgagaattggatatttgtttgatgaaagaagcacaacgagttgttcaagctcatggtagcatacagtttgaaaacctaatttatcgaggagaagctctgaaggcatatagaggtgaatacgtcaccctaagatacgatcccgaccatgtcctgactttatatgtctatagttgcgaagctgatgataatgcagaagagttcttgggctatgctcacgctataaacatggatactcatgacttgagtatagaagaattgaaaactctcaataaagaacgaagtaaagctcgtagcgatcattacaactatgatgctttattagcattgggtaaacgcaaagaacttgtagaagaaagaaaacaagacaagaaagcaaaaaggcaatcagagcaaaaacgtctccgcactgcttccaagaaaaactcaaatgttattgaactacgcaaaagtagagcttcgagttcttcaagtaaagatgaccgacaggaaattttaccagagagagtttctagggacgaactaaagccggagaaaacagaactgaaatatgaggaaaatctgttagcacagaccgatactcaaaaacaggagagacataagttagttgtctctgaccgtaaaaaaaatttaaagaacatttggtgataaaggaggtaaataatggccatatctcaactggcaacccaaccatttgtcgaagtcttacctccagagttagatagcaaagctcaaattgctaaaactattgatattgaggagcttttcagaattaattttatcacaaccgatcggtcatcagaatgtttcagatggttagatgagctgcgtatcctgaaacaatgcggtcggatcattggaccaagaaatgtaggcaaaagccgagcagtgcttcactatcgtaatgaggataaaaaacgagtttcttatgtaaaggcttggtcggcatcgagttctaaacgtctattttcacaaatcttaaaggatattaaccatgctgcatcaacaggtaaacgacaggatttacgtccaagattagctggtagtcttgaactatttggattagaattggtcattgttgataatgctgaaaatcttcaaaaagaggcgctcttagatttaaagcaactttttgaagaatgccatgttcctattgtcttagttggaggtaaggagttagatgatattttagaagattttgatttgttgactaactttccaacgttatatgagtttgaacgattggaacatgatgattttataaaaacattaaagacaatcgaattggatattttatctcttccagaagcgtctaagttaagtgagggtaacatatttgcaattttagctgagagtacaggtgggaaaataggaattttagtcaagatactaactaaagcagttttacattctcttaaaaagggatttggtaaagttgatgaaagcattttagaaaaaatcgcaagtcgttatggaacaaaatacgttcccattgaaaacaaaaatagaaacgattaatagaggaggatataaatgattgaagatgatgaaattcgtctaaggttgggctatgttgaaccacacccaggtgaaagcatcagtcattatttgggacggcttcgtcgatttaaggctaacagccttccttcaggatatgctctaggaaaaattgcgggtcttgggtctgttctgactcgatgggaaaagttgtacttcaacccatttcccactcaacaagaactagaggcattagcacaagtgattcaagtggaggttgagaaattaagagagatgctacccactaaaggtgtcacaatgatgcctcgacccattcgattatgtgcggcttgctatgcagagtcaccttatcaccggatcgagtggcagtttaaggacaaaatgaagtgcgatcgccatcagttgcgcttattaacaaaatgcacaaactgtcagacaccattccccattcctgctgattgggaaaaaggagaatgctcgcattgttttttgtcttttgctaagatggtgaagtgtcaaaagcgtcgttagtaacctaggctgctgccaccgctgagcaataactagcataaccccttggggcctctaaacgggtcttgaggggttttttgctgaaacctcaggcatttgagaagcacacggtcacactgcttccggtagtcaataaaccggtaaaccagcaatagacataagcggctatttaacgaccctgccctgaaccgacgaccgggtcatcgtggccggatcttgcggcccctcggcttgaacgaattgttagacattatttgccgactaccttggtgatctcgcctttcacgtagtggacaaattcttccaactgatctgcgcgcgaggccaagcgatcttcttcttgtccaagataagcctgtctagcttcaagtatgacgggctgatactgggccggcaggcgctccattgcccagtcggcagcgacatccttcggcgcgattttgccggttactgcgctgtaccaaatgcgggacaacgtaagcactacatttcgctcatcgccagcccagtcgggcggcgagttccatagcgttaaggtttcatttagcgcctcaaatagatcctgttcaggaaccggatcaaagagttcctccgccgctggacctaccaaggcaacgctatgttctcttgcttttgtcagcaagatagccagatcaatgtcgatcgtggctggctcgaagatacctgcaagaatgtcattgcgctgccattctccaaattgcagttcgcgcttagctggataacgccacggaatgatgtcgtcgtgcacaacaatggtgacttctacagcgcggagaatctcgctctctccaggggaagccgaagtttccaaaaggtcgttgatcaaagctcgccgcgttgtttcatcaagccttacggtcaccgtaaccagcaaatcaatatcactgtgtggcttcaggccgccatccactgcggagccgtacaaatgtacggccagcaacgtcggttcgagatggcgctcgatgacgccaactacctctgatagttgagtcgatacttcggcgatcaccgcttccctcatactcttcctttttcaatattattgaagcatttatcagggttattgtctcatgagcggatacatatttgaatgtatttagaaaaataaacaaatagctagctcactcggtcgctacgctccgggcgtgagactgcggcgggcgctgcggacacatacaaagttacccacagattccgtggataagcaggggactaacatgtgaggcaaaacagcagggccgcgccggtggcgtttttccataggctccgccctcctgccagagttcacataaacagacgcttttccggtgcatctgtgggagccgtgaggctcaaccatgaatctgacagtacgggcgaaacccgacaggacttaaagatccccaccgtttccggcgggtcgctccctcttgcgctctcctgttccgaccctgccgtttaccggatacctgttccgcctttctcccttacgggaagtgtggcgctttctcatagctcacacactggtatctcggctcggtgtaggtcgttcgctccaagctgggctgtaagcaagaactccccgttcagcccgactgctgcgccttatccggtaactgttcacttgagtccaacccggaaaagcacggtaaaacgccactggcagcagccattggtaactgggagttcgcagaggatttgtttagctaaacacgcggttgctcttgaagtgtgcgccaaagtccggctacactggaaggacagatttggttgctgtgctctgcgaaagccagttaccacggttaagcagttccccaactgacttaaccttcgatcaaaccacctccccaggtggttttttcgtttacagggcaaaagattacgcgcagaaaaaaaggatctcaagaagatcctttgatc

SEQ ID NO: 59 - DNA, 9133 bp, artificial sequence
  Synthetic
ttttctactgaaccgctctagatttcagtgcaatttatctcttcaaatgtagcacctgaagtcagccccatacgatataagttgtaattctcatgttagtcatgccccgcgcccaccggaaggagctgactgggttgaaggctctcaagggcatcggtcgagatcccggtgcctaatgagtgagctaacttacattaattgcgttgcgctcactgcccgctttccagtcgggaaacctgtcgtgccagctgcattaatgaatcggccaacgcgcggggagaggcggtttgcgtattgggcgccagggtggtttttcttttcaccagtgagacgggcaacagctgattgcccttcaccgcctggccctgagagagttgcagcaagcggtccacgctggtttgccccagcaggcgaaaatcctgtttgatggtggttaacggcgggatataacatgagctgtcttcggtatcgtcgtatcccactaccgagatgtccgcaccaacgcgcagcccggactcggtaatggcgcgcattgcgcccagcgccatctgatcgttggcaaccagcatcgcagtgggaacgatgccctcattcagcatttgcatggtttgttgaaaaccggacatggcactccagtcgccttcccgttccgctatcggctgaatttgattgcgagtgagatatttatgccagccagccagacgcagacgcgccgagacagaacttaatgggcccgctaacagcgcgatttgctggtgacccaatgcgaccagatgctccacgcccagtcgcgtaccgtcttcatgggagaaaataatactgttgatgggtgtctggtcagagacatcaagaaataacgccggaacattagtgcaggcagcttccacagcaatggcatcctggtcatccagcggatagttaatgatcagcccactgacgcgttgcgcgagaagattgtgcaccgccgctttacaggcttcgacgccgcttcgttctaccatcgacaccaccacgctggcacccagttgatcggcgcgagatttaatcgccgcgacaatttgcgacggcgcgtgcagggccagactggaggtggcaacgccaatcagcaacgactgtttgcccgccagttgttgtgccacgcggttgggaatgtaattcagctccgccatcgccgcttccactttttcccgcgttttcgcagaaacgtggctggcctggttcaccacgcgggaaacggtctgataagagacaccggcatactctgcgacatcgtataacgttactggtttcacattcaccaccctgaattgactctcttccgggcgctatcatgccataccgcgaaaggttttgcgccattcgatggtgtccgggatctcgacgctctcccttatgcgactcctgctaatacgactcactatagggtactaatagcgccgcagttcatgctctttaagagtctctgtactgtggaaaatctgggttagtttgacggttggaaaaccgttttgctttctgaccctggtagctgcccgcttctcatgctctgacttttcacgttatgtggaaaaagtaacgtaatttcgttagttaagacttaccgtaaaaagtcagttctgatgctgctgtcgcaagacaggataggtgcgctcccagcaaaaggagtatgtcttgaaaaagactagccgttctagtaacggtgcggattaccgcagtggtggctactgaatcacccccttcgtcgggggaaccctccaaaaggtgggttgaaagcggataatgcgaacagcgcacgggtaccctagcataaccccttggggcctctaaacgggtcttgaggggttttttggtcgaacagaaagtaatcgtattgtacacggccgcataatcgaaattaatacgactcactataggggaattgtgagcggataacaattccccatcttagtatattagttaagtataagaaggagatatacatatgagcacaatcacgattcaatgccgcctagttgcagaagaagcgaccctgcgctacttttgggaacttatggctgagaagaatacgccactcattaatgaattgttggagcagttaggacaacatccagattttgatacttgggtacaagcaggcaagatgcctgaaaagacagttgagaacttgtgcaagtccctagaagatcgagaaccttttgcaaatcagcccggtcgttttcgtacttcggcagttgctctggtaaagtacatttacaaatcctggtttgcgttacaaaaacgtcgggcggacagactagaaggtaaagagcgctggttaaagatgctcaaaagtgatgtggaactggaacgagaaagcaactgtagtttggatattattcgagctaaagctggggaaattcttgctaaagttactgaggggtgcgctccgagcaatcaaacatcctctaagagaaaaaagaagaaaactaaaaaaagccaagcgacaaaagatctccctacgcttttcgagattatattaaaggcttacgaacaagctgaagaaagcctgacacgagctgcccttgcttatctccttaaaaatgactgtgaagtcagtgaagttgatgaagattcagagaaatttaaaaagcgtcggcgtaaaaaggaaatagaaattgaacgtttaagaaatcaactgaaaagtcggatacctaaaggtcgcgatttaaccggagataagtggttgaaaacgctagaagaagccacccgaaatgttcctgaaaatgaggatgaggcaaaggcttggcaagcccaactcttgagagaagctagttctgttccttttcctgtagcttatgaaactagtgaagatatgacttggtttaccaacgagcaaggtcgaatctttgtttactttaatggttcagccaaacataaatttcaagtttattgcgatcgccgtcaacttcattggtttcaacgttttgtagaggactttcaaatcaagaaaaatggtgataaaaaaggtagcgaaaaggagtaccctgctgggttattgacgctttgttccactcgtctgagatggaaagaaagcgcggaaaaaggagatccttggaatgttcatcgcctaattctttcttgcactatcgatacacgcttatggacacttgaaggaacggaacaggtgcgagctgaaaagatcgctcaggttgaaaaaactattagcaagcgggagcaagaagttaatctgagtaagactcaacttgagcgtttacaagccaagcacagtgagagggagagattgaacaacatttttcccaaccgccctagcaagcccagttaccggggtaaatctcatattgcgatcggtgtaagtttcagtttggaaaacccagccactgttgccgtcgtagatgttgcaaccaagaaagtccttacttaccgcagtttcaaacaattactcggagataactacaaccttgcaaaccggctgcggcaacaaaagcaacgtctttctcacgaacgtcacaaagctcagaaacaaggcgcaccaaattcatttggagactcagagttagggcagtatgtagacagattgcttgcaaaatcgattgtcgcgatcgcaaaaacttatcaagctagtagtattgtcttgcctaaacttcgctatatgagggaaatcatacataatgaagttcaagctaaagccgaaaaaaagattccaggatataaagaaggtcaaaaacaatatgccaaacagtatcggataagcgttcatcaatggagttataatagattatcacagattcttgaaagccaagctacaaaagctggaatttctattgaacgtggatcgcaagtaatccaaggtagctcccaagaacaagcacgagatttagctttatttgcctataacgaacgccaacttagtctgggttagtaacctttaataaggagatataccatgggcttagacgaagaatttgagttcactgaggaattgacgcaagctccagatgttattgtgcttgacaagagtcattttgtggtagacccatcccaaattattctgcaaacatcggataagcataaactgagatttaatcttatcaagtggttcgctgaatcccccaacattactattaaatctcagagaaaacaggcagtcgtagatacccttggtgtttctactcggcaggtggagcgtctcctcaagcaatatcataatggtgagttatcagagacagcgggagtacaacgctcagataaggggaaacttcgcatcagccaatactgggaagattatattaaaacaacttatgaaaaaagtctgaaagataaacatccaatgttgccagcagctgtcgtgcgggaagtgaagcgacacgcgatcgttgacctcggactgaaaccaggagattatccccatccagccaccatctatagaaatttagctcctttaatcgagcaacacacgcggaagaaaaaagttagaaatccgggttcgggatcttggctgaccgttgtcacgcgagatggtcagctactgaaggctgactttagtaaccaaattatccaatgcgaccataccgagctggatattcatatagttgatagtcatggcagtttattgtctgaccgtccttggctaactactgttgtcgatacttattcaagttgcattcttggttttcatttatggatcaaacaaccaggttctacggaggtagctcttgccttgagacacgccattctacccaaaaattatccagaggactacaaacttggcaaagtttgggaaatatatggacctccttttcagtatttttttactgatggtggaaaagattttaattcaaagcatctaaaagccattggtaagaaattaggatttcagtgcgaactacgcaatcgcccgccccaaggtggaattgtagaacgtctttttaaaaccattaatactcaagttcttaaagagcttcccggttacacgggggcaaacgttcaagaacgcccgaaaaatgcagagaaagaagcctgtttaacaatacaggatttggataaaattctagccagcttcttttgtgatatttataaccacgaaccctatcccaaggagcctcgcaacacgagatttgaacgctggtttaaaggtatggggggaaaattacccgaacctttggacgagcgagaattggatatttgtttgatgaaagaagcacaacgagttgttcaagctcatggtagcatacagtttgaaaacctaatttatcgaggagaagctctgaaggcatatagaggtgaatacgtcaccctaagatacgatcccgaccatgtcctgactttatatgtctatagttgcgaagctgatgataatgcagaagagttcttgggctatgctcacgctataaacatggatactcatgacttgagtatagaagaattgaaaactctcaataaagaacgaagtaaagctcgtagcgatcattacaactatgatgctttattagcattgggtaaacgcaaagaacttgtagaagaaagaaaacaagacaagaaagcaaaaaggcaatcagagcaaaaacgtctccgcactgcttccaagaaaaactcaaatgttattgaactacgcaaaagtagagcttcgagttcttcaagtaaagatgaccgacaggaaattttaccagagagagtttctagggacgaactaaagccggagaaaacagaactgaaatatgaggaaaatctgttagcacagaccgatactcaaaaacaggagagacataagttagttgtctctgaccgtaaaaaaaatttaaagaacatttggtgataaaggaggtaaataatggccatatctcaactggcaacccaaccatttgtcgaagtcttacctccagagttagatagcaaagctcaaattgctaaaactattgatattgaggagcttttcagaattaattttatcacaaccgatcggtcatcagaatgtttcagatggttagatgagctgcgtatcctgaaacaatgcggtcggatcattggaccaagaaatgtaggcaaaagccgagcagtgcttcactatcgtaatgaggataaaaaacgagtttcttatgtaaaggcttggtcggcatcgagttctaaacgtctattttcacaaatcttaaaggatattaaccatgctgcatcaacaggtaaacgacaggatttacgtccaagattagctggtagtcttgaactatttggattagaattggtcattgttgataatgctgaaaatcttcaaaaagaggcgctcttagatttaaagcaactttttgaagaatgccatgttcctattgtcttagttggaggtaaggagttagatgatattttagaagattttgatttgttgactaactttccaacgttatatgagtttgaacgattggaacatgatgattttataaaaacattaaagacaatcgaattggatattttatctcttccagaagcgtctaagttaagtgagggtaacatatttgcaattttagctgagagtacaggtgggaaaataggaattttagtcaagatactaactaaagcagttttacattctcttaaaaagggatttggtaaagttgatgaaagcattttagaaaaaatcgcaagtcgttatggaacaaaatacgttcccattgaaaacaaaaatagaaacgattaatagaggaggatataaatgattgaagatgatgaaattcgtctaaggttgggctatgttgaaccacacccaggtgaaagcatcagtcattatttgggacggcttcgtcgatttaaggctaacagccttccttcaggatatgctctaggaaaaattgcgggtcttgggtctgttctgactcgatgggaaaagttgtacttcaacccatttcccactcaacaagaactagaggcattagcacaagtgattcaagtggaggttgagaaattaagagagatgctacccactaaaggtgtcacaatgatgcctcgacccattcgattatgtgcggcttgctatgcagagtcaccttatcaccggatcgagtggcagtttaaggacaaaatgaagtgcgatcgccatcagttgcgcttattaacaaaatgcacaaactgtcagacaccattccccattcctgctgattgggaaaaaggagaatgctcgcattgttttttgtcttttgctaagatggtgaagtgtcaaaagcgtcgttagtaacctaggctgctgccaccgctgagcaataactagcataaccccttggggcctctaaacgggtcttgaggggttttttgctgaaacctcaggcatttgagaagcacacggtcacactgcttccggtagtcaataaaccggtaaaccagcaatagacataagcggctatttaacgaccctgccctgaaccgacgaccgggtcatcgtggccggatcttgcggcccctcggcttgaacgaattgttagacattatttgccgactaccttggtgatctcgcctttcacgtagtggacaaattcttccaactgatctgcgcgcgaggccaagcgatcttcttcttgtccaagataagcctgtctagcttcaagtatgacgggctgatactgggccggcaggcgctccattgcccagtcggcagcgacatccttcggcgcgattttgccggttactgcgctgtaccaaatgcgggacaacgtaagcactacatttcgctcatcgccagcccagtcgggcggcgagttccatagcgttaaggtttcatttagcgcctcaaatagatcctgttcaggaaccggatcaaagagttcctccgccgctggacctaccaaggcaacgctatgttctcttgcttttgtcagcaagatagccagatcaatgtcgatcgtggctggctcgaagatacctgcaagaatgtcattgcgctgccattctccaaattgcagttcgcgcttagctggataacgccacggaatgatgtcgtcgtgcacaacaatggtgacttctacagcgcggagaatctcgctctctccaggggaagccgaagtttccaaaaggtcgttgatcaaagctcgccgcgttgtttcatcaagccttacggtcaccgtaaccagcaaatcaatatcactgtgtggcttcaggccgccatccactgcggagccgtacaaatgtacggccagcaacgtcggttcgagatggcgctcgatgacgccaactacctctgatagttgagtcgatacttcggcgatcaccgcttccctcatactcttcctttttcaatattattgaagcatttatcagggttattgtctcatgagcggatacatatttgaatgtatttagaaaaataaacaaatagctagctcactcggtcgctacgctccgggcgtgagactgcggcgggcgctgcggacacatacaaagttacccacagattccgtggataagcaggggactaacatgtgaggcaaaacagcagggccgcgccggtggcgtttttccataggctccgccctcctgccagagttcacataaacagacgcttttccggtgcatctgtgggagccgtgaggctcaaccatgaatctgacagtacgggcgaaacccgacaggacttaaagatccccaccgtttccggcgggtcgctccctcttgcgctctcctgttccgaccctgccgtttaccggatacctgttccgcctttctcccttacgggaagtgtggcgctttctcatagctcacacactggtatctcggctcggtgtaggtcgttcgctccaagctgggctgtaagcaagaactccccgttcagcccgactgctgcgccttatccggtaactgttcacttgagtccaacccggaaaagcacggtaaaacgccactggcagcagccattggtaactgggagttcgcagaggatttgtttagctaaacacgcggttgctcttgaagtgtgcgccaaagtccggctacactggaaggacagatttggttgctgtgctctgcgaaagccagttaccacggttaagcagttccccaactgacttaaccttcgatcaaaccacctccccaggtggttttttcgtttacagggcaaaagattacgcgcagaaaaaaaggatctcaagaagatcctttgatc

SEQ ID NO: 60 - DNA, 9133 bp, artificial sequence
  Synthetic
ttttctactgaaccgctctagatttcagtgcaatttatctcttcaaatgtagcacctgaagtcagccccatacgatataagttgtaattctcatgttagtcatgccccgcgcccaccggaaggagctgactgggttgaaggctctcaagggcatcggtcgagatcccggtgcctaatgagtgagctaacttacattaattgcgttgcgctcactgcccgctttccagtcgggaaacctgtcgtgccagctgcattaatgaatcggccaacgcgcggggagaggcggtttgcgtattgggcgccagggtggtttttcttttcaccagtgagacgggcaacagctgattgcccttcaccgcctggccctgagagagttgcagcaagcggtccacgctggtttgccccagcaggcgaaaatcctgtttgatggtggttaacggcgggatataacatgagctgtcttcggtatcgtcgtatcccactaccgagatgtccgcaccaacgcgcagcccggactcggtaatggcgcgcattgcgcccagcgccatctgatcgttggcaaccagcatcgcagtgggaacgatgccctcattcagcatttgcatggtttgttgaaaaccggacatggcactccagtcgccttcccgttccgctatcggctgaatttgattgcgagtgagatatttatgccagccagccagacgcagacgcgccgagacagaacttaatgggcccgctaacagcgcgatttgctggtgacccaatgcgaccagatgctccacgcccagtcgcgtaccgtcttcatgggagaaaataatactgttgatgggtgtctggtcagagacatcaagaaataacgccggaacattagtgcaggcagcttccacagcaatggcatcctggtcatccagcggatagttaatgatcagcccactgacgcgttgcgcgagaagattgtgcaccgccgctttacaggcttcgacgccgcttcgttctaccatcgacaccaccacgctggcacccagttgatcggcgcgagatttaatcgccgcgacaatttgcgacggcgcgtgcagggccagactggaggtggcaacgccaatcagcaacgactgtttgcccgccagttgttgtgccacgcggttgggaatgtaattcagctccgccatcgccgcttccactttttcccgcgttttcgcagaaacgtggctggcctggttcaccacgcgggaaacggtctgataagagacaccggcatactctgcgacatcgtataacgttactggtttcacattcaccaccctgaattgactctcttccgggcgctatcatgccataccgcgaaaggttttgcgccattcgatggtgtccgggatctcgacgctctcccttatgcgactcctgctaatacgactcactatagggtactaatagcgccgcagttcatgctctttaagagtctctgtactgtggaaaatctgggttagtttgacggttggaaaaccgttttgctttctgaccctggtagctgcccgcttctcatgctctgacttttcacgttatgtggaaaaagtaacgtaatttcgttagttaagacttaccgtaaaaagtcagttctgatgctgctgtcgcaagacaggataggtgcgctcccagcaaaaggagtatgtcttgaaaaagactagccgttctagtaacggtgcggattaccgcagtggtggctactgaatcacccccttcgtcgggggaaccctccaaaaggtgggttgaaagtttagcgaaaccgccaagactgtgtaccctagcataaccccttggggcctctaaacgggtcttgaggggttttttggtcgaacagaaagtaatcgtattgtacacggccgcataatcgaaattaatacgactcactataggggaattgtgagcggataacaattccccatcttagtatattagttaagtataagaaggagatatacatatgagcacaatcacgattcaatgccgcctagttgcagaagaagcgaccctgcgctacttttgggaacttatggctgagaagaatacgccactcattaatgaattgttggagcagttaggacaacatccagattttgatacttgggtacaagcaggcaagatgcctgaaaagacagttgagaacttgtgcaagtccctagaagatcgagaaccttttgcaaatcagcccggtcgttttcgtacttcggcagttgctctggtaaagtacatttacaaatcctggtttgcgttacaaaaacgtcgggcggacagactagaaggtaaagagcgctggttaaagatgctcaaaagtgatgtggaactggaacgagaaagcaactgtagtttggatattattcgagctaaagctggggaaattcttgctaaagttactgaggggtgcgctccgagcaatcaaacatcctctaagagaaaaaagaagaaaactaaaaaaagccaagcgacaaaagatctccctacgcttttcgagattatattaaaggcttacgaacaagctgaagaaagcctgacacgagctgcccttgcttatctccttaaaaatgactgtgaagtcagtgaagttgatgaagattcagagaaatttaaaaagcgtcggcgtaaaaaggaaatagaaattgaacgtttaagaaatcaactgaaaagtcggatacctaaaggtcgcgatttaaccggagataagtggttgaaaacgctagaagaagccacccgaaatgttcctgaaaatgaggatgaggcaaaggcttggcaagcccaactcttgagagaagctagttctgttccttttcctgtagcttatgaaactagtgaagatatgacttggtttaccaacgagcaaggtcgaatctttgtttactttaatggttcagccaaacataaatttcaagtttattgcgatcgccgtcaacttcattggtttcaacgttttgtagaggactttcaaatcaagaaaaatggtgataaaaaaggtagcgaaaaggagtaccctgctgggttattgacgctttgttccactcgtctgagatggaaagaaagcgcggaaaaaggagatccttggaatgttcatcgcctaattctttcttgcactatcgatacacgcttatggacacttgaaggaacggaacaggtgcgagctgaaaagatcgctcaggttgaaaaaactattagcaagcgggagcaagaagttaatctgagtaagactcaacttgagcgtttacaagccaagcacagtgagagggagagattgaacaacatttttcccaaccgccctagcaagcccagttaccggggtaaatctcatattgcgatcggtgtaagtttcagtttggaaaacccagccactgttgccgtcgtagatgttgcaaccaagaaagtccttacttaccgcagtttcaaacaattactcggagataactacaaccttgcaaaccggctgcggcaacaaaagcaacgtctttctcacgaacgtcacaaagctcagaaacaaggcgcaccaaattcatttggagactcagagttagggcagtatgtagacagattgcttgcaaaatcgattgtcgcgatcgcaaaaacttatcaagctagtagtattgtcttgcctaaacttcgctatatgagggaaatcatacataatgaagttcaagctaaagccgaaaaaaagattccaggatataaagaaggtcaaaaacaatatgccaaacagtatcggataagcgttcatcaatggagttataatagattatcacagattcttgaaagccaagctacaaaagctggaatttctattgaacgtggatcgcaagtaatccaaggtagctcccaagaacaagcacgagatttagctttatttgcctataacgaacgccaacttagtctgggttagtaacctttaataaggagatataccatgggcttagacgaagaatttgagttcactgaggaattgacgcaagctccagatgttattgtgcttgacaagagtcattttgtggtagacccatcccaaattattctgcaaacatcggataagcataaactgagatttaatcttatcaagtggttcgctgaatcccccaacattactattaaatctcagagaaaacaggcagtcgtagatacccttggtgtttctactcggcaggtggagcgtctcctcaagcaatatcataatggtgagttatcagagacagcgggagtacaacgctcagataaggggaaacttcgcatcagccaatactgggaagattatattaaaacaacttatgaaaaaagtctgaaagataaacatccaatgttgccagcagctgtcgtgcgggaagtgaagcgacacgcgatcgttgacctcggactgaaaccaggagattatccccatccagccaccatctatagaaatttagctcctttaatcgagcaacacacgcggaagaaaaaagttagaaatccgggttcgggatcttggctgaccgttgtcacgcgagatggtcagctactgaaggctgactttagtaaccaaattatccaatgcgaccataccgagctggatattcatatagttgatagtcatggcagtttattgtctgaccgtccttggctaactactgttgtcgatacttattcaagttgcattcttggttttcatttatggatcaaacaaccaggttctacggaggtagctcttgccttgagacacgccattctacccaaaaattatccagaggactacaaacttggcaaagtttgggaaatatatggacctccttttcagtatttttttactgatggtggaaaagattttaattcaaagcatctaaaagccattggtaagaaattaggatttcagtgcgaactacgcaatcgcccgccccaaggtggaattgtagaacgtctttttaaaaccattaatactcaagttcttaaagagcttcccggttacacgggggcaaacgttcaagaacgcccgaaaaatgcagagaaagaagcctgtttaacaatacaggatttggataaaattctagccagcttcttttgtgatatttataaccacgaaccctatcccaaggagcctcgcaacacgagatttgaacgctggtttaaaggtatggggggaaaattacccgaacctttggacgagcgagaattggatatttgtttgatgaaagaagcacaacgagttgttcaagctcatggtagcatacagtttgaaaacctaatttatcgaggagaagctctgaaggcatatagaggtgaatacgtcaccctaagatacgatcccgaccatgtcctgactttatatgtctatagttgcgaagctgatgataatgcagaagagttcttgggctatgctcacgctataaacatggatactcatgacttgagtatagaagaattgaaaactctcaataaagaacgaagtaaagctcgtagcgatcattacaactatgatgctttattagcattgggtaaacgcaaagaacttgtagaagaaagaaaacaagacaagaaagcaaaaaggcaatcagagcaaaaacgtctccgcactgcttccaagaaaaactcaaatgttattgaactacgcaaaagtagagcttcgagttcttcaagtaaagatgaccgacaggaaattttaccagagagagtttctagggacgaactaaagccggagaaaacagaactgaaatatgaggaaaatctgttagcacagaccgatactcaaaaacaggagagacataagttagttgtctctgaccgtaaaaaaaatttaaagaacatttggtgataaaggaggtaaataatggccatatctcaactggcaacccaaccatttgtcgaagtcttacctccagagttagatagcaaagctcaaattgctaaaactattgatattgaggagcttttcagaattaattttatcacaaccgatcggtcatcagaatgtttcagatggttagatgagctgcgtatcctgaaacaatgcggtcggatcattggaccaagaaatgtaggcaaaagccgagcagtgcttcactatcgtaatgaggataaaaaacgagtttcttatgtaaaggcttggtcggcatcgagttctaaacgtctattttcacaaatcttaaaggatattaaccatgctgcatcaacaggtaaacgacaggatttacgtccaagattagctggtagtcttgaactatttggattagaattggtcattgttgataatgctgaaaatcttcaaaaagaggcgctcttagatttaaagcaactttttgaagaatgccatgttcctattgtcttagttggaggtaaggagttagatgatattttagaagattttgatttgttgactaactttccaacgttatatgagtttgaacgattggaacatgatgattttataaaaacattaaagacaatcgaattggatattttatctcttccagaagcgtctaagttaagtgagggtaacatatttgcaattttagctgagagtacaggtgggaaaataggaattttagtcaagatactaactaaagcagttttacattctcttaaaaagggatttggtaaagttgatgaaagcattttagaaaaaatcgcaagtcgttatggaacaaaatacgttcccattgaaaacaaaaatagaaacgattaatagaggaggatataaatgattgaagatgatgaaattcgtctaaggttgggctatgttgaaccacacccaggtgaaagcatcagtcattatttgggacggcttcgtcgatttaaggctaacagccttccttcaggatatgctctaggaaaaattgcgggtcttgggtctgttctgactcgatgggaaaagttgtacttcaacccatttcccactcaacaagaactagaggcattagcacaagtgattcaagtggaggttgagaaattaagagagatgctacccactaaaggtgtcacaatgatgcctcgacccattcgattatgtgcggcttgctatgcagagtcaccttatcaccggatcgagtggcagtttaaggacaaaatgaagtgcgatcgccatcagttgcgcttattaacaaaatgcacaaactgtcagacaccattccccattcctgctgattgggaaaaaggagaatgctcgcattgttttttgtcttttgctaagatggtgaagtgtcaaaagcgtcgttagtaacctaggctgctgccaccgctgagcaataactagcataaccccttggggcctctaaacgggtcttgaggggttttttgctgaaacctcaggcatttgagaagcacacggtcacactgcttccggtagtcaataaaccggtaaaccagcaatagacataagcggctatttaacgaccctgccctgaaccgacgaccgggtcatcgtggccggatcttgcggcccctcggcttgaacgaattgttagacattatttgccgactaccttggtgatctcgcctttcacgtagtggacaaattcttccaactgatctgcgcgcgaggccaagcgatcttcttcttgtccaagataagcctgtctagcttcaagtatgacgggctgatactgggccggcaggcgctccattgcccagtcggcagcgacatccttcggcgcgattttgccggttactgcgctgtaccaaatgcgggacaacgtaagcactacatttcgctcatcgccagcccagtcgggcggcgagttccatagcgttaaggtttcatttagcgcctcaaatagatcctgttcaggaaccggatcaaagagttcctccgccgctggacctaccaaggcaacgctatgttctcttgcttttgtcagcaagatagccagatcaatgtcgatcgtggctggctcgaagatacctgcaagaatgtcattgcgctgccattctccaaattgcagttcgcgcttagctggataacgccacggaatgatgtcgtcgtgcacaacaatggtgacttctacagcgcggagaatctcgctctctccaggggaagccgaagtttccaaaaggtcgttgatcaaagctcgccgcgttgtttcatcaagccttacggtcaccgtaaccagcaaatcaatatcactgtgtggcttcaggccgccatccactgcggagccgtacaaatgtacggccagcaacgtcggttcgagatggcgctcgatgacgccaactacctctgatagttgagtcgatacttcggcgatcaccgcttccctcatactcttcctttttcaatattattgaagcatttatcagggttattgtctcatgagcggatacatatttgaatgtatttagaaaaataaacaaatagctagctcactcggtcgctacgctccgggcgtgagactgcggcgggcgctgcggacacatacaaagttacccacagattccgtggataagcaggggactaacatgtgaggcaaaacagcagggccgcgccggtggcgtttttccataggctccgccctcctgccagagttcacataaacagacgcttttccggtgcatctgtgggagccgtgaggctcaaccatgaatctgacagtacgggcgaaacccgacaggacttaaagatccccaccgtttccggcgggtcgctccctcttgcgctctcctgttccgaccctgccgtttaccggatacctgttccgcctttctcccttacgggaagtgtggcgctttctcatagctcacacactggtatctcggctcggtgtaggtcgttcgctccaagctgggctgtaagcaagaactccccgttcagcccgactgctgcgccttatccggtaactgttcacttgagtccaacccggaaaagcacggtaaaacgccactggcagcagccattggtaactgggagttcgcagaggatttgtttagctaaacacgcggttgctcttgaagtgtgcgccaaagtccggctacactggaaggacagatttggttgctgtgctctgcgaaagccagttaccacggttaagcagttccccaactgacttaaccttcgatcaaaccacctccccaggtggttttttcgtttacagggcaaaagattacgcgcagaaaaaaaggatctcaagaagatcctttgatc

SEQ ID NO: 61 - DNA, 9133 bp, artificial sequence
  Synthetic
ttttctactgaaccgctctagatttcagtgcaatttatctcttcaaatgtagcacctgaagtcagccccatacgatataagttgtaattctcatgttagtcatgccccgcgcccaccggaaggagctgactgggttgaaggctctcaagggcatcggtcgagatcccggtgcctaatgagtgagctaacttacattaattgcgttgcgctcactgcccgctttccagtcgggaaacctgtcgtgccagctgcattaatgaatcggccaacgcgcggggagaggcggtttgcgtattgggcgccagggtggtttttcttttcaccagtgagacgggcaacagctgattgcccttcaccgcctggccctgagagagttgcagcaagcggtccacgctggtttgccccagcaggcgaaaatcctgtttgatggtggttaacggcgggatataacatgagctgtcttcggtatcgtcgtatcccactaccgagatgtccgcaccaacgcgcagcccggactcggtaatggcgcgcattgcgcccagcgccatctgatcgttggcaaccagcatcgcagtgggaacgatgccctcattcagcatttgcatggtttgttgaaaaccggacatggcactccagtcgccttcccgttccgctatcggctgaatttgattgcgagtgagatatttatgccagccagccagacgcagacgcgccgagacagaacttaatgggcccgctaacagcgcgatttgctggtgacccaatgcgaccagatgctccacgcccagtcgcgtaccgtcttcatgggagaaaataatactgttgatgggtgtctggtcagagacatcaagaaataacgccggaacattagtgcaggcagcttccacagcaatggcatcctggtcatccagcggatagttaatgatcagcccactgacgcgttgcgcgagaagattgtgcaccgccgctttacaggcttcgacgccgcttcgttctaccatcgacaccaccacgctggcacccagttgatcggcgcgagatttaatcgccgcgacaatttgcgacggcgcgtgcagggccagactggaggtggcaacgccaatcagcaacgactgtttgcccgccagttgttgtgccacgcggttgggaatgtaattcagctccgccatcgccgcttccactttttcccgcgttttcgcagaaacgtggctggcctggttcaccacgcgggaaacggtctgataagagacaccggcatactctgcgacatcgtataacgttactggtttcacattcaccaccctgaattgactctcttccgggcgctatcatgccataccgcgaaaggttttgcgccattcgatggtgtccgggatctcgacgctctcccttatgcgactcctgctaatacgactcactatagggtactaatagcgccgcagttcatgctctttaagagtctctgtactgtggaaaatctgggttagtttgacggttggaaaaccgttttgctttctgaccctggtagctgcccgcttctcatgctctgacttttcacgttatgtggaaaaagtaacgtaatttcgttagttaagacttaccgtaaaaagtcagttctgatgctgctgtcgcaagacaggataggtgcgctcccagcaaaaggagtatgtcttgaaaaagactagccgttctagtaacggtgcggattaccgcagtggtggctactgaatcacccccttcgtcgggggaaccctccaaaaggtgggttgaaagaggcggtcgggatagttttcttggtaccctagcataaccccttggggcctctaaacgggtcttgaggggttttttggtcgaacagaaagtaatcgtattgtacacggccgcataatcgaaattaatacgactcactataggggaattgtgagcggataacaattccccatcttagtatattagttaagtataagaaggagatatacatatgagcacaatcacgattcaatgccgcctagttgcagaagaagcgaccctgcgctacttttgggaacttatggctgagaagaatacgccactcattaatgaattgttggagcagttaggacaacatccagattttgatacttgggtacaagcaggcaagatgcctgaaaagacagttgagaacttgtgcaagtccctagaagatcgagaaccttttgcaaatcagcccggtcgttttcgtacttcggcagttgctctggtaaagtacatttacaaatcctggtttgcgttacaaaaacgtcgggcggacagactagaaggtaaagagcgctggttaaagatgctcaaaagtgatgtggaactggaacgagaaagcaactgtagtttggatattattcgagctaaagctggggaaattcttgctaaagttactgaggggtgcgctccgagcaatcaaacatcctctaagagaaaaaagaagaaaactaaaaaaagccaagcgacaaaagatctccctacgcttttcgagattatattaaaggcttacgaacaagctgaagaaagcctgacacgagctgcccttgcttatctccttaaaaatgactgtgaagtcagtgaagttgatgaagattcagagaaatttaaaaagcgtcggcgtaaaaaggaaatagaaattgaacgtttaagaaatcaactgaaaagtcggatacctaaaggtcgcgatttaaccggagataagtggttgaaaacgctagaagaagccacccgaaatgttcctgaaaatgaggatgaggcaaaggcttggcaagcccaactcttgagagaagctagttctgttccttttcctgtagcttatgaaactagtgaagatatgacttggtttaccaacgagcaaggtcgaatctttgtttactttaatggttcagccaaacataaatttcaagtttattgcgatcgccgtcaacttcattggtttcaacgttttgtagaggactttcaaatcaagaaaaatggtgataaaaaaggtagcgaaaaggagtaccctgctgggttattgacgctttgttccactcgtctgagatggaaagaaagcgcggaaaaaggagatccttggaatgttcatcgcctaattctttcttgcactatcgatacacgcttatggacacttgaaggaacggaacaggtgcgagctgaaaagatcgctcaggttgaaaaaactattagcaagcgggagcaagaagttaatctgagtaagactcaacttgagcgtttacaagccaagcacagtgagagggagagattgaacaacatttttcccaaccgccctagcaagcccagttaccggggtaaatctcatattgcgatcggtgtaagtttcagtttggaaaacccagccactgttgccgtcgtagatgttgcaaccaagaaagtccttacttaccgcagtttcaaacaattactcggagataactacaaccttgcaaaccggctgcggcaacaaaagcaacgtctttctcacgaacgtcacaaagctcagaaacaaggcgcaccaaattcatttggagactcagagttagggcagtatgtagacagattgcttgcaaaatcgattgtcgcgatcgcaaaaacttatcaagctagtagtattgtcttgcctaaacttcgctatatgagggaaatcatacataatgaagttcaagctaaagccgaaaaaaagattccaggatataaagaaggtcaaaaacaatatgccaaacagtatcggataagcgttcatcaatggagttataatagattatcacagattcttgaaagccaagctacaaaagctggaatttctattgaacgtggatcgcaagtaatccaaggtagctcccaagaacaagcacgagatttagctttatttgcctataacgaacgccaacttagtctgggttagtaacctttaataaggagatataccatgggcttagacgaagaatttgagttcactgaggaattgacgcaagctccagatgttattgtgcttgacaagagtcattttgtggtagacccatcccaaattattctgcaaacatcggataagcataaactgagatttaatcttatcaagtggttcgctgaatcccccaacattactattaaatctcagagaaaacaggcagtcgtagatacccttggtgtttctactcggcaggtggagcgtctcctcaagcaatatcataatggtgagttatcagagacagcgggagtacaacgctcagataaggggaaacttcgcatcagccaatactgggaagattatattaaaacaacttatgaaaaaagtctgaaagataaacatccaatgttgccagcagctgtcgtgcgggaagtgaagcgacacgcgatcgttgacctcggactgaaaccaggagattatccccatccagccaccatctatagaaatttagctcctttaatcgagcaacacacgcggaagaaaaaagttagaaatccgggttcgggatcttggctgaccgttgtcacgcgagatggtcagctactgaaggctgactttagtaaccaaattatccaatgcgaccataccgagctggatattcatatagttgatagtcatggcagtttattgtctgaccgtccttggctaactactgttgtcgatacttattcaagttgcattcttggttttcatttatggatcaaacaaccaggttctacggaggtagctcttgccttgagacacgccattctacccaaaaattatccagaggactacaaacttggcaaagtttgggaaatatatggacctccttttcagtatttttttactgatggtggaaaagattttaattcaaagcatctaaaagccattggtaagaaattaggatttcagtgcgaactacgcaatcgcccgccccaaggtggaattgtagaacgtctttttaaaaccattaatactcaagttcttaaagagcttcccggttacacgggggcaaacgttcaagaacgcccgaaaaatgcagagaaagaagcctgtttaacaatacaggatttggataaaattctagccagcttcttttgtgatatttataaccacgaaccctatcccaaggagcctcgcaacacgagatttgaacgctggtttaaaggtatggggggaaaattacccgaacctttggacgagcgagaattggatatttgtttgatgaaagaagcacaacgagttgttcaagctcatggtagcatacagtttgaaaacctaatttatcgaggagaagctctgaaggcatatagaggtgaatacgtcaccctaagatacgatcccgaccatgtcctgactttatatgtctatagttgcgaagctgatgataatgcagaagagttcttgggctatgctcacgctataaacatggatactcatgacttgagtatagaagaattgaaaactctcaataaagaacgaagtaaagctcgtagcgatcattacaactatgatgctttattagcattgggtaaacgcaaagaacttgtagaagaaagaaaacaagacaagaaagcaaaaaggcaatcagagcaaaaacgtctccgcactgcttccaagaaaaactcaaatgttattgaactacgcaaaagtagagcttcgagttcttcaagtaaagatgaccgacaggaaattttaccagagagagtttctagggacgaactaaagccggagaaaacagaactgaaatatgaggaaaatctgttagcacagaccgatactcaaaaacaggagagacataagttagttgtctctgaccgtaaaaaaaatttaaagaacatttggtgataaaggaggtaaataatggccatatctcaactggcaacccaaccatttgtcgaagtcttacctccagagttagatagcaaagctcaaattgctaaaactattgatattgaggagcttttcagaattaattttatcacaaccgatcggtcatcagaatgtttcagatggttagatgagctgcgtatcctgaaacaatgcggtcggatcattggaccaagaaatgtaggcaaaagccgagcagtgcttcactatcgtaatgaggataaaaaacgagtttcttatgtaaaggcttggtcggcatcgagttctaaacgtctattttcacaaatcttaaaggatattaaccatgctgcatcaacaggtaaacgacaggatttacgtccaagattagctggtagtcttgaactatttggattagaattggtcattgttgataatgctgaaaatcttcaaaaagaggcgctcttagatttaaagcaactttttgaagaatgccatgttcctattgtcttagttggaggtaaggagttagatgatattttagaagattttgatttgttgactaactttccaacgttatatgagtttgaacgattggaacatgatgattttataaaaacattaaagacaatcgaattggatattttatctcttccagaagcgtctaagttaagtgagggtaacatatttgcaattttagctgagagtacaggtgggaaaataggaattttagtcaagatactaactaaagcagttttacattctcttaaaaagggatttggtaaagttgatgaaagcattttagaaaaaatcgcaagtcgttatggaacaaaatacgttcccattgaaaacaaaaatagaaacgattaatagaggaggatataaatgattgaagatgatgaaattcgtctaaggttgggctatgttgaaccacacccaggtgaaagcatcagtcattatttgggacggcttcgtcgatttaaggctaacagccttccttcaggatatgctctaggaaaaattgcgggtcttgggtctgttctgactcgatgggaaaagttgtacttcaacccatttcccactcaacaagaactagaggcattagcacaagtgattcaagtggaggttgagaaattaagagagatgctacccactaaaggtgtcacaatgatgcctcgacccattcgattatgtgcggcttgctatgcagagtcaccttatcaccggatcgagtggcagtttaaggacaaaatgaagtgcgatcgccatcagttgcgcttattaacaaaatgcacaaactgtcagacaccattccccattcctgctgattgggaaaaaggagaatgctcgcattgttttttgtcttttgctaagatggtgaagtgtcaaaagcgtcgttagtaacctaggctgctgccaccgctgagcaataactagcataaccccttggggcctctaaacgggtcttgaggggttttttgctgaaacctcaggcatttgagaagcacacggtcacactgcttccggtagtcaataaaccggtaaaccagcaatagacataagcggctatttaacgaccctgccctgaaccgacgaccgggtcatcgtggccggatcttgcggcccctcggcttgaacgaattgttagacattatttgccgactaccttggtgatctcgcctttcacgtagtggacaaattcttccaactgatctgcgcgcgaggccaagcgatcttcttcttgtccaagataagcctgtctagcttcaagtatgacgggctgatactgggccggcaggcgctccattgcccagtcggcagcgacatccttcggcgcgattttgccggttactgcgctgtaccaaatgcgggacaacgtaagcactacatttcgctcatcgccagcccagtcgggcggcgagttccatagcgttaaggtttcatttagcgcctcaaatagatcctgttcaggaaccggatcaaagagttcctccgccgctggacctaccaaggcaacgctatgttctcttgcttttgtcagcaagatagccagatcaatgtcgatcgtggctggctcgaagatacctgcaagaatgtcattgcgctgccattctccaaattgcagttcgcgcttagctggataacgccacggaatgatgtcgtcgtgcacaacaatggtgacttctacagcgcggagaatctcgctctctccaggggaagccgaagtttccaaaaggtcgttgatcaaagctcgccgcgttgtttcatcaagccttacggtcaccgtaaccagcaaatcaatatcactgtgtggcttcaggccgccatccactgcggagccgtacaaatgtacggccagcaacgtcggttcgagatggcgctcgatgacgccaactacctctgatagttgagtcgatacttcggcgatcaccgcttccctcatactcttcctttttcaatattattgaagcatttatcagggttattgtctcatgagcggatacatatttgaatgtatttagaaaaataaacaaatagctagctcactcggtcgctacgctccgggcgtgagactgcggcgggcgctgcggacacatacaaagttacccacagattccgtggataagcaggggactaacatgtgaggcaaaacagcagggccgcgccggtggcgtttttccataggctccgccctcctgccagagttcacataaacagacgcttttccggtgcatctgtgggagccgtgaggctcaaccatgaatctgacagtacgggcgaaacccgacaggacttaaagatccccaccgtttccggcgggtcgctccctcttgcgctctcctgttccgaccctgccgtttaccggatacctgttccgcctttctcccttacgggaagtgtggcgctttctcatagctcacacactggtatctcggctcggtgtaggtcgttcgctccaagctgggctgtaagcaagaactccccgttcagcccgactgctgcgccttatccggtaactgttcacttgagtccaacccggaaaagcacggtaaaacgccactggcagcagccattggtaactgggagttcgcagaggatttgtttagctaaacacgcggttgctcttgaagtgtgcgccaaagtccggctacactggaaggacagatttggttgctgtgctctgcgaaagccagttaccacggttaagcagttccccaactgacttaaccttcgatcaaaccacctccccaggtggttttttcgtttacagggcaaaagattacgcgcagaaaaaaaggatctcaagaagatcctttgatc

SEQ ID NO: 62 - DNA, 9133 bp, artificial sequence
  Synthetic
ttttctactgaaccgctctagatttcagtgcaatttatctcttcaaatgtagcacctgaagtcagccccatacgatataagttgtaattctcatgttagtcatgccccgcgcccaccggaaggagctgactgggttgaaggctctcaagggcatcggtcgagatcccggtgcctaatgagtgagctaacttacattaattgcgttgcgctcactgcccgctttccagtcgggaaacctgtcgtgccagctgcattaatgaatcggccaacgcgcggggagaggcggtttgcgtattgggcgccagggtggtttttcttttcaccagtgagacgggcaacagctgattgcccttcaccgcctggccctgagagagttgcagcaagcggtccacgctggtttgccccagcaggcgaaaatcctgtttgatggtggttaacggcgggatataacatgagctgtcttcggtatcgtcgtatcccactaccgagatgtccgcaccaacgcgcagcccggactcggtaatggcgcgcattgcgcccagcgccatctgatcgttggcaaccagcatcgcagtgggaacgatgccctcattcagcatttgcatggtttgttgaaaaccggacatggcactccagtcgccttcccgttccgctatcggctgaatttgattgcgagtgagatatttatgccagccagccagacgcagacgcgccgagacagaacttaatgggcccgctaacagcgcgatttgctggtgacccaatgcgaccagatgctccacgcccagtcgcgtaccgtcttcatgggagaaaataatactgttgatgggtgtctggtcagagacatcaagaaataacgccggaacattagtgcaggcagcttccacagcaatggcatcctggtcatccagcggatagttaatgatcagcccactgacgcgttgcgcgagaagattgtgcaccgccgctttacaggcttcgacgccgcttcgttctaccatcgacaccaccacgctggcacccagttgatcggcgcgagatttaatcgccgcgacaatttgcgacggcgcgtgcagggccagactggaggtggcaacgccaatcagcaacgactgtttgcccgccagttgttgtgccacgcggttgggaatgtaattcagctccgccatcgccgcttccactttttcccgcgttttcgcagaaacgtggctggcctggttcaccacgcgggaaacggtctgataagagacaccggcatactctgcgacatcgtataacgttactggtttcacattcaccaccctgaattgactctcttccgggcgctatcatgccataccgcgaaaggttttgcgccattcgatggtgtccgggatctcgacgctctcccttatgcgactcctgctaatacgactcactatagggtactaatagcgccgcagttcatgctctttaagagtctctgtactgtggaaaatctgggttagtttgacggttggaaaaccgttttgctttctgaccctggtagctgcccgcttctcatgctctgacttttcacgttatgtggaaaaagtaacgtaatttcgttagttaagacttaccgtaaaaagtcagttctgatgctgctgtcgcaagacaggataggtgcgctcccagcaaaaggagtatgtcttgaaaaagactagccgttctagtaacggtgcggattaccgcagtggtggctactgaatcacccccttcgtcgggggaaccctccaaaaggtgggttgaaagcagcggttccttactggcattgagtaccctagcataaccccttggggcctctaaacgggtcttgaggggttttttggtcgaacagaaagtaatcgtattgtacacggccgcataatcgaaattaatacgactcactataggggaattgtgagcggataacaattccccatcttagtatattagttaagtataagaaggagatatacatatgagcacaatcacgattcaatgccgcctagttgcagaagaagcgaccctgcgctacttttgggaacttatggctgagaagaatacgccactcattaatgaattgttggagcagttaggacaacatccagattttgatacttgggtacaagcaggcaagatgcctgaaaagacagttgagaacttgtgcaagtccctagaagatcgagaaccttttgcaaatcagcccggtcgttttcgtacttcggcagttgctctggtaaagtacatttacaaatcctggtttgcgttacaaaaacgtcgggcggacagactagaaggtaaagagcgctggttaaagatgctcaaaagtgatgtggaactggaacgagaaagcaactgtagtttggatattattcgagctaaagctggggaaattcttgctaaagttactgaggggtgcgctccgagcaatcaaacatcctctaagagaaaaaagaagaaaactaaaaaaagccaagcgacaaaagatctccctacgcttttcgagattatattaaaggcttacgaacaagctgaagaaagcctgacacgagctgcccttgcttatctccttaaaaatgactgtgaagtcagtgaagttgatgaagattcagagaaatttaaaaagcgtcggcgtaaaaaggaaatagaaattgaacgtttaagaaatcaactgaaaagtcggatacctaaaggtcgcgatttaaccggagataagtggttgaaaacgctagaagaagccacccgaaatgttcctgaaaatgaggatgaggcaaaggcttggcaagcccaactcttgagagaagctagttctgttccttttcctgtagcttatgaaactagtgaagatatgacttggtttaccaacgagcaaggtcgaatctttgtttactttaatggttcagccaaacataaatttcaagtttattgcgatcgccgtcaacttcattggtttcaacgttttgtagaggactttcaaatcaagaaaaatggtgataaaaaaggtagcgaaaaggagtaccctgctgggttattgacgctttgttccactcgtctgagatggaaagaaagcgcggaaaaaggagatccttggaatgttcatcgcctaattctttcttgcactatcgatacacgcttatggacacttgaaggaacggaacaggtgcgagctgaaaagatcgctcaggttgaaaaaactattagcaagcgggagcaagaagttaatctgagtaagactcaacttgagcgtttacaagccaagcacagtgagagggagagattgaacaacatttttcccaaccgccctagcaagcccagttaccggggtaaatctcatattgcgatcggtgtaagtttcagtttggaaaacccagccactgttgccgtcgtagatgttgcaaccaagaaagtccttacttaccgcagtttcaaacaattactcggagataactacaaccttgcaaaccggctgcggcaacaaaagcaacgtctttctcacgaacgtcacaaagctcagaaacaaggcgcaccaaattcatttggagactcagagttagggcagtatgtagacagattgcttgcaaaatcgattgtcgcgatcgcaaaaacttatcaagctagtagtattgtcttgcctaaacttcgctatatgagggaaatcatacataatgaagttcaagctaaagccgaaaaaaagattccaggatataaagaaggtcaaaaacaatatgccaaacagtatcggataagcgttcatcaatggagttataatagattatcacagattcttgaaagccaagctacaaaagctggaatttctattgaacgtggatcgcaagtaatccaaggtagctcccaagaacaagcacgagatttagctttatttgcctataacgaacgccaacttagtctgggttagtaacctttaataaggagatataccatgggcttagacgaagaatttgagttcactgaggaattgacgcaagctccagatgttattgtgcttgacaagagtcattttgtggtagacccatcccaaattattctgcaaacatcggataagcataaactgagatttaatcttatcaagtggttcgctgaatcccccaacattactattaaatctcagagaaaacaggcagtcgtagatacccttggtgtttctactcggcaggtggagcgtctcctcaagcaatatcataatggtgagttatcagagacagcgggagtacaacgctcagataaggggaaacttcgcatcagccaatactgggaagattatattaaaacaacttatgaaaaaagtctgaaagataaacatccaatgttgccagcagctgtcgtgcgggaagtgaagcgacacgcgatcgttgacctcggactgaaaccaggagattatccccatccagccaccatctatagaaatttagctcctttaatcgagcaacacacgcggaagaaaaaagttagaaatccgggttcgggatcttggctgaccgttgtcacgcgagatggtcagctactgaaggctgactttagtaaccaaattatccaatgcgaccataccgagctggatattcatatagttgatagtcatggcagtttattgtctgaccgtccttggctaactactgttgtcgatacttattcaagttgcattcttggttttcatttatggatcaaacaaccaggttctacggaggtagctcttgccttgagacacgccattctacccaaaaattatccagaggactacaaacttggcaaagtttgggaaatatatggacctccttttcagtatttttttactgatggtggaaaagattttaattcaaagcatctaaaagccattggtaagaaattaggatttcagtgcgaactacgcaatcgcccgccccaaggtggaattgtagaacgtctttttaaaaccattaatactcaagttcttaaagagcttcccggttacacgggggcaaacgttcaagaacgcccgaaaaatgcagagaaagaagcctgtttaacaatacaggatttggataaaattctagccagcttcttttgtgatatttataaccacgaaccctatcccaaggagcctcgcaacacgagatttgaacgctggtttaaaggtatggggggaaaattacccgaacctttggacgagcgagaattggatatttgtttgatgaaagaagcacaacgagttgttcaagctcatggtagcatacagtttgaaaacctaatttatcgaggagaagctctgaaggcatatagaggtgaatacgtcaccctaagatacgatcccgaccatgtcctgactttatatgtctatagttgcgaagctgatgataatgcagaagagttcttgggctatgctcacgctataaacatggatactcatgacttgagtatagaagaattgaaaactctcaataaagaacgaagtaaagctcgtagcgatcattacaactatgatgctttattagcattgggtaaacgcaaagaacttgtagaagaaagaaaacaagacaagaaagcaaaaaggcaatcagagcaaaaacgtctccgcactgcttccaagaaaaactcaaatgttattgaactacgcaaaagtagagcttcgagttcttcaagtaaagatgaccgacaggaaattttaccagagagagtttctagggacgaactaaagccggagaaaacagaactgaaatatgaggaaaatctgttagcacagaccgatactcaaaaacaggagagacataagttagttgtctctgaccgtaaaaaaaatttaaagaacatttggtgataaaggaggtaaataatggccatatctcaactggcaacccaaccatttgtcgaagtcttacctccagagttagatagcaaagctcaaattgctaaaactattgatattgaggagcttttcagaattaattttatcacaaccgatcggtcatcagaatgtttcagatggttagatgagctgcgtatcctgaaacaatgcggtcggatcattggaccaagaaatgtaggcaaaagccgagcagtgcttcactatcgtaatgaggataaaaaacgagtttcttatgtaaaggcttggtcggcatcgagttctaaacgtctattttcacaaatcttaaaggatattaaccatgctgcatcaacaggtaaacgacaggatttacgtccaagattagctggtagtcttgaactatttggattagaattggtcattgttgataatgctgaaaatcttcaaaaagaggcgctcttagatttaaagcaactttttgaagaatgccatgttcctattgtcttagttggaggtaaggagttagatgatattttagaagattttgatttgttgactaactttccaacgttatatgagtttgaacgattggaacatgatgattttataaaaacattaaagacaatcgaattggatattttatctcttccagaagcgtctaagttaagtgagggtaacatatttgcaattttagctgagagtacaggtgggaaaataggaattttagtcaagatactaactaaagcagttttacattctcttaaaaagggatttggtaaagttgatgaaagcattttagaaaaaatcgcaagtcgttatggaacaaaatacgttcccattgaaaacaaaaatagaaacgattaatagaggaggatataaatgattgaagatgatgaaattcgtctaaggttgggctatgttgaaccacacccaggtgaaagcatcagtcattatttgggacggcttcgtcgatttaaggctaacagccttccttcaggatatgctctaggaaaaattgcgggtcttgggtctgttctgactcgatgggaaaagttgtacttcaacccatttcccactcaacaagaactagaggcattagcacaagtgattcaagtggaggttgagaaattaagagagatgctacccactaaaggtgtcacaatgatgcctcgacccattcgattatgtgcggcttgctatgcagagtcaccttatcaccggatcgagtggcagtttaaggacaaaatgaagtgcgatcgccatcagttgcgcttattaacaaaatgcacaaactgtcagacaccattccccattcctgctgattgggaaaaaggagaatgctcgcattgttttttgtcttttgctaagatggtgaagtgtcaaaagcgtcgttagtaacctaggctgctgccaccgctgagcaataactagcataaccccttggggcctctaaacgggtcttgaggggttttttgctgaaacctcaggcatttgagaagcacacggtcacactgcttccggtagtcaataaaccggtaaaccagcaatagacataagcggctatttaacgaccctgccctgaaccgacgaccgggtcatcgtggccggatcttgcggcccctcggcttgaacgaattgttagacattatttgccgactaccttggtgatctcgcctttcacgtagtggacaaattcttccaactgatctgcgcgcgaggccaagcgatcttcttcttgtccaagataagcctgtctagcttcaagtatgacgggctgatactgggccggcaggcgctccattgcccagtcggcagcgacatccttcggcgcgattttgccggttactgcgctgtaccaaatgcgggacaacgtaagcactacatttcgctcatcgccagcccagtcgggcggcgagttccatagcgttaaggtttcatttagcgcctcaaatagatcctgttcaggaaccggatcaaagagttcctccgccgctggacctaccaaggcaacgctatgttctcttgcttttgtcagcaagatagccagatcaatgtcgatcgtggctggctcgaagatacctgcaagaatgtcattgcgctgccattctccaaattgcagttcgcgcttagctggataacgccacggaatgatgtcgtcgtgcacaacaatggtgacttctacagcgcggagaatctcgctctctccaggggaagccgaagtttccaaaaggtcgttgatcaaagctcgccgcgttgtttcatcaagccttacggtcaccgtaaccagcaaatcaatatcactgtgtggcttcaggccgccatccactgcggagccgtacaaatgtacggccagcaacgtcggttcgagatggcgctcgatgacgccaactacctctgatagttgagtcgatacttcggcgatcaccgcttccctcatactcttcctttttcaatattattgaagcatttatcagggttattgtctcatgagcggatacatatttgaatgtatttagaaaaataaacaaatagctagctcactcggtcgctacgctccgggcgtgagactgcggcgggcgctgcggacacatacaaagttacccacagattccgtggataagcaggggactaacatgtgaggcaaaacagcagggccgcgccggtggcgtttttccataggctccgccctcctgccagagttcacataaacagacgcttttccggtgcatctgtgggagccgtgaggctcaaccatgaatctgacagtacgggcgaaacccgacaggacttaaagatccccaccgtttccggcgggtcgctccctcttgcgctctcctgttccgaccctgccgtttaccggatacctgttccgcctttctcccttacgggaagtgtggcgctttctcatagctcacacactggtatctcggctcggtgtaggtcgttcgctccaagctgggctgtaagcaagaactccccgttcagcccgactgctgcgccttatccggtaactgttcacttgagtccaacccggaaaagcacggtaaaacgccactggcagcagccattggtaactgggagttcgcagaggatttgtttagctaaacacgcggttgctcttgaagtgtgcgccaaagtccggctacactggaaggacagatttggttgctgtgctctgcgaaagccagttaccacggttaagcagttccccaactgacttaaccttcgatcaaaccacctccccaggtggttttttcgtttacagggcaaaagattacgcgcagaaaaaaaggatctcaagaagatcctttgatc

SEQ ID NO: 63 - DNA, 9133 bp, artificial sequence
  Synthetic
ttttctactgaaccgctctagatttcagtgcaatttatctcttcaaatgtagcacctgaagtcagccccatacgatataagttgtaattctcatgttagtcatgccccgcgcccaccggaaggagctgactgggttgaaggctctcaagggcatcggtcgagatcccggtgcctaatgagtgagctaacttacattaattgcgttgcgctcactgcccgctttccagtcgggaaacctgtcgtgccagctgcattaatgaatcggccaacgcgcggggagaggcggtttgcgtattgggcgccagggtggtttttcttttcaccagtgagacgggcaacagctgattgcccttcaccgcctggccctgagagagttgcagcaagcggtccacgctggtttgccccagcaggcgaaaatcctgtttgatggtggttaacggcgggatataacatgagctgtcttcggtatcgtcgtatcccactaccgagatgtccgcaccaacgcgcagcccggactcggtaatggcgcgcattgcgcccagcgccatctgatcgttggcaaccagcatcgcagtgggaacgatgccctcattcagcatttgcatggtttgttgaaaaccggacatggcactccagtcgccttcccgttccgctatcggctgaatttgattgcgagtgagatatttatgccagccagccagacgcagacgcgccgagacagaacttaatgggcccgctaacagcgcgatttgctggtgacccaatgcgaccagatgctccacgcccagtcgcgtaccgtcttcatgggagaaaataatactgttgatgggtgtctggtcagagacatcaagaaataacgccggaacattagtgcaggcagcttccacagcaatggcatcctggtcatccagcggatagttaatgatcagcccactgacgcgttgcgcgagaagattgtgcaccgccgctttacaggcttcgacgccgcttcgttctaccatcgacaccaccacgctggcacccagttgatcggcgcgagatttaatcgccgcgacaatttgcgacggcgcgtgcagggccagactggaggtggcaacgccaatcagcaacgactgtttgcccgccagttgttgtgccacgcggttgggaatgtaattcagctccgccatcgccgcttccactttttcccgcgttttcgcagaaacgtggctggcctggttcaccacgcgggaaacggtctgataagagacaccggcatactctgcgacatcgtataacgttactggtttcacattcaccaccctgaattgactctcttccgggcgctatcatgccataccgcgaaaggttttgcgccattcgatggtgtccgggatctcgacgctctcccttatgcgactcctgctaatacgactcactatagggtactaatagcgccgcagttcatgctctttaagagtctctgtactgtggaaaatctgggttagtttgacggttggaaaaccgttttgctttctgaccctggtagctgcccgcttctcatgctctgacttttcacgttatgtggaaaaagtaacgtaatttcgttagttaagacttaccgtaaaaagtcagttctgatgctgctgtcgcaagacaggataggtgcgctcccagcaaaaggagtatgtcttgaaaaagactagccgttctagtaacggtgcggattaccgcagtggtggctactgaatcacccccttcgtcgggggaaccctccaaaaggtgggttgaaagttcgacgttcagacgtagtgtgagtaccctagcataaccccttggggcctctaaacgggtcttgaggggttttttggtcgaacagaaagtaatcgtattgtacacggccgcataatcgaaattaatacgactcactataggggaattgtgagcggataacaattccccatcttagtatattagttaagtataagaaggagatatacatatgagcacaatcacgattcaatgccgcctagttgcagaagaagcgaccctgcgctacttttgggaacttatggctgagaagaatacgccactcattaatgaattgttggagcagttaggacaacatccagattttgatacttgggtacaagcaggcaagatgcctgaaaagacagttgagaacttgtgcaagtccctagaagatcgagaaccttttgcaaatcagcccggtcgttttcgtacttcggcagttgctctggtaaagtacatttacaaatcctggtttgcgttacaaaaacgtcgggcggacagactagaaggtaaagagcgctggttaaagatgctcaaaagtgatgtggaactggaacgagaaagcaactgtagtttggatattattcgagctaaagctggggaaattcttgctaaagttactgaggggtgcgctccgagcaatcaaacatcctctaagagaaaaaagaagaaaactaaaaaaagccaagcgacaaaagatctccctacgcttttcgagattatattaaaggcttacgaacaagctgaagaaagcctgacacgagctgcccttgcttatctccttaaaaatgactgtgaagtcagtgaagttgatgaagattcagagaaatttaaaaagcgtcggcgtaaaaaggaaatagaaattgaacgtttaagaaatcaactgaaaagtcggatacctaaaggtcgcgatttaaccggagataagtggttgaaaacgctagaagaagccacccgaaatgttcctgaaaatgaggatgaggcaaaggcttggcaagcccaactcttgagagaagctagttctgttccttttcctgtagcttatgaaactagtgaagatatgacttggtttaccaacgagcaaggtcgaatctttgtttactttaatggttcagccaaacataaatttcaagtttattgcgatcgccgtcaacttcattggtttcaacgttttgtagaggactttcaaatcaagaaaaatggtgataaaaaaggtagcgaaaaggagtaccctgctgggttattgacgctttgttccactcgtctgagatggaaagaaagcgcggaaaaaggagatccttggaatgttcatcgcctaattctttcttgcactatcgatacacgcttatggacacttgaaggaacggaacaggtgcgagctgaaaagatcgctcaggttgaaaaaactattagcaagcgggagcaagaagttaatctgagtaagactcaacttgagcgtttacaagccaagcacagtgagagggagagattgaacaacatttttcccaaccgccctagcaagcccagttaccggggtaaatctcatattgcgatcggtgtaagtttcagtttggaaaacccagccactgttgccgtcgtagatgttgcaaccaagaaagtccttacttaccgcagtttcaaacaattactcggagataactacaaccttgcaaaccggctgcggcaacaaaagcaacgtctttctcacgaacgtcacaaagctcagaaacaaggcgcaccaaattcatttggagactcagagttagggcagtatgtagacagattgcttgcaaaatcgattgtcgcgatcgcaaaaacttatcaagctagtagtattgtcttgcctaaacttcgctatatgagggaaatcatacataatgaagttcaagctaaagccgaaaaaaagattccaggatataaagaaggtcaaaaacaatatgccaaacagtatcggataagcgttcatcaatggagttataatagattatcacagattcttgaaagccaagctacaaaagctggaatttctattgaacgtggatcgcaagtaatccaaggtagctcccaagaacaagcacgagatttagctttatttgcctataacgaacgccaacttagtctgggttagtaacctttaataaggagatataccatgggcttagacgaagaatttgagttcactgaggaattgacgcaagctccagatgttattgtgcttgacaagagtcattttgtggtagacccatcccaaattattctgcaaacatcggataagcataaactgagatttaatcttatcaagtggttcgctgaatcccccaacattactattaaatctcagagaaaacaggcagtcgtagatacccttggtgtttctactcggcaggtggagcgtctcctcaagcaatatcataatggtgagttatcagagacagcgggagtacaacgctcagataaggggaaacttcgcatcagccaatactgggaagattatattaaaacaacttatgaaaaaagtctgaaagataaacatccaatgttgccagcagctgtcgtgcgggaagtgaagcgacacgcgatcgttgacctcggactgaaaccaggagattatccccatccagccaccatctatagaaatttagctcctttaatcgagcaacacacgcggaagaaaaaagttagaaatccgggttcgggatcttggctgaccgttgtcacgcgagatggtcagctactgaaggctgactttagtaaccaaattatccaatgcgaccataccgagctggatattcatatagttgatagtcatggcagtttattgtctgaccgtccttggctaactactgttgtcgatacttattcaagttgcattcttggttttcatttatggatcaaacaaccaggttctacggaggtagctcttgccttgagacacgccattctacccaaaaattatccagaggactacaaacttggcaaagtttgggaaatatatggacctccttttcagtatttttttactgatggtggaaaagattttaattcaaagcatctaaaagccattggtaagaaattaggatttcagtgcgaactacgcaatcgcccgccccaaggtggaattgtagaacgtctttttaaaaccattaatactcaagttcttaaagagcttcccggttacacgggggcaaacgttcaagaacgcccgaaaaatgcagagaaagaagcctgtttaacaatacaggatttggataaaattctagccagcttcttttgtgatatttataaccacgaaccctatcccaaggagcctcgcaacacgagatttgaacgctggtttaaaggtatggggggaaaattacccgaacctttggacgagcgagaattggatatttgtttgatgaaagaagcacaacgagttgttcaagctcatggtagcatacagtttgaaaacctaatttatcgaggagaagctctgaaggcatatagaggtgaatacgtcaccctaagatacgatcccgaccatgtcctgactttatatgtctatagttgcgaagctgatgataatgcagaagagttcttgggctatgctcacgctataaacatggatactcatgacttgagtatagaagaattgaaaactctcaataaagaacgaagtaaagctcgtagcgatcattacaactatgatgctttattagcattgggtaaacgcaaagaacttgtagaagaaagaaaacaagacaagaaagcaaaaaggcaatcagagcaaaaacgtctccgcactgcttccaagaaaaactcaaatgttattgaactacgcaaaagtagagcttcgagttcttcaagtaaagatgaccgacaggaaattttaccagagagagtttctagggacgaactaaagccggagaaaacagaactgaaatatgaggaaaatctgttagcacagaccgatactcaaaaacaggagagacataagttagttgtctctgaccgtaaaaaaaatttaaagaacatttggtgataaaggaggtaaataatggccatatctcaactggcaacccaaccatttgtcgaagtcttacctccagagttagatagcaaagctcaaattgctaaaactattgatattgaggagcttttcagaattaattttatcacaaccgatcggtcatcagaatgtttcagatggttagatgagctgcgtatcctgaaacaatgcggtcggatcattggaccaagaaatgtaggcaaaagccgagcagtgcttcactatcgtaatgaggataaaaaacgagtttcttatgtaaaggcttggtcggcatcgagttctaaacgtctattttcacaaatcttaaaggatattaaccatgctgcatcaacaggtaaacgacaggatttacgtccaagattagctggtagtcttgaactatttggattagaattggtcattgttgataatgctgaaaatcttcaaaaagaggcgctcttagatttaaagcaactttttgaagaatgccatgttcctattgtcttagttggaggtaaggagttagatgatattttagaagattttgatttgttgactaactttccaacgttatatgagtttgaacgattggaacatgatgattttataaaaacattaaagacaatcgaattggatattttatctcttccagaagcgtctaagttaagtgagggtaacatatttgcaattttagctgagagtacaggtgggaaaataggaattttagtcaagatactaactaaagcagttttacattctcttaaaaagggatttggtaaagttgatgaaagcattttagaaaaaatcgcaagtcgttatggaacaaaatacgttcccattgaaaacaaaaatagaaacgattaatagaggaggatataaatgattgaagatgatgaaattcgtctaaggttgggctatgttgaaccacacccaggtgaaagcatcagtcattatttgggacggcttcgtcgatttaaggctaacagccttccttcaggatatgctctaggaaaaattgcgggtcttgggtctgttctgactcgatgggaaaagttgtacttcaacccatttcccactcaacaagaactagaggcattagcacaagtgattcaagtggaggttgagaaattaagagagatgctacccactaaaggtgtcacaatgatgcctcgacccattcgattatgtgcggcttgctatgcagagtcaccttatcaccggatcgagtggcagtttaaggacaaaatgaagtgcgatcgccatcagttgcgcttattaacaaaatgcacaaactgtcagacaccattccccattcctgctgattgggaaaaaggagaatgctcgcattgttttttgtcttttgctaagatggtgaagtgtcaaaagcgtcgttagtaacctaggctgctgccaccgctgagcaataactagcataaccccttggggcctctaaacgggtcttgaggggttttttgctgaaacctcaggcatttgagaagcacacggtcacactgcttccggtagtcaataaaccggtaaaccagcaatagacataagcggctatttaacgaccctgccctgaaccgacgaccgggtcatcgtggccggatcttgcggcccctcggcttgaacgaattgttagacattatttgccgactaccttggtgatctcgcctttcacgtagtggacaaattcttccaactgatctgcgcgcgaggccaagcgatcttcttcttgtccaagataagcctgtctagcttcaagtatgacgggctgatactgggccggcaggcgctccattgcccagtcggcagcgacatccttcggcgcgattttgccggttactgcgctgtaccaaatgcgggacaacgtaagcactacatttcgctcatcgccagcccagtcgggcggcgagttccatagcgttaaggtttcatttagcgcctcaaatagatcctgttcaggaaccggatcaaagagttcctccgccgctggacctaccaaggcaacgctatgttctcttgcttttgtcagcaagatagccagatcaatgtcgatcgtggctggctcgaagatacctgcaagaatgtcattgcgctgccattctccaaattgcagttcgcgcttagctggataacgccacggaatgatgtcgtcgtgcacaacaatggtgacttctacagcgcggagaatctcgctctctccaggggaagccgaagtttccaaaaggtcgttgatcaaagctcgccgcgttgtttcatcaagccttacggtcaccgtaaccagcaaatcaatatcactgtgtggcttcaggccgccatccactgcggagccgtacaaatgtacggccagcaacgtcggttcgagatggcgctcgatgacgccaactacctctgatagttgagtcgatacttcggcgatcaccgcttccctcatactcttcctttttcaatattattgaagcatttatcagggttattgtctcatgagcggatacatatttgaatgtatttagaaaaataaacaaatagctagctcactcggtcgctacgctccgggcgtgagactgcggcgggcgctgcggacacatacaaagttacccacagattccgtggataagcaggggactaacatgtgaggcaaaacagcagggccgcgccggtggcgtttttccataggctccgccctcctgccagagttcacataaacagacgcttttccggtgcatctgtgggagccgtgaggctcaaccatgaatctgacagtacgggcgaaacccgacaggacttaaagatccccaccgtttccggcgggtcgctccctcttgcgctctcctgttccgaccctgccgtttaccggatacctgttccgcctttctcccttacgggaagtgtggcgctttctcatagctcacacactggtatctcggctcggtgtaggtcgttcgctccaagctgggctgtaagcaagaactccccgttcagcccgactgctgcgccttatccggtaactgttcacttgagtccaacccggaaaagcacggtaaaacgccactggcagcagccattggtaactgggagttcgcagaggatttgtttagctaaacacgcggttgctcttgaagtgtgcgccaaagtccggctacactggaaggacagatttggttgctgtgctctgcgaaagccagttaccacggttaagcagttccccaactgacttaaccttcgatcaaaccacctccccaggtggttttttcgtttacagggcaaaagattacgcgcagaaaaaaaggatctcaagaagatcctttgatc

SEQ ID NO: 64 - DNA, 9133 bp, artificial sequence
  Synthetic
ttttctactgaaccgctctagatttcagtgcaatttatctcttcaaatgtagcacctgaagtcagccccatacgatataagttgtaattctcatgttagtcatgccccgcgcccaccggaaggagctgactgggttgaaggctctcaagggcatcggtcgagatcccggtgcctaatgagtgagctaacttacattaattgcgttgcgctcactgcccgctttccagtcgggaaacctgtcgtgccagctgcattaatgaatcggccaacgcgcggggagaggcggtttgcgtattgggcgccagggtggtttttcttttcaccagtgagacgggcaacagctgattgcccttcaccgcctggccctgagagagttgcagcaagcggtccacgctggtttgccccagcaggcgaaaatcctgtttgatggtggttaacggcgggatataacatgagctgtcttcggtatcgtcgtatcccactaccgagatgtccgcaccaacgcgcagcccggactcggtaatggcgcgcattgcgcccagcgccatctgatcgttggcaaccagcatcgcagtgggaacgatgccctcattcagcatttgcatggtttgttgaaaaccggacatggcactccagtcgccttcccgttccgctatcggctgaatttgattgcgagtgagatatttatgccagccagccagacgcagacgcgccgagacagaacttaatgggcccgctaacagcgcgatttgctggtgacccaatgcgaccagatgctccacgcccagtcgcgtaccgtcttcatgggagaaaataatactgttgatgggtgtctggtcagagacatcaagaaataacgccggaacattagtgcaggcagcttccacagcaatggcatcctggtcatccagcggatagttaatgatcagcccactgacgcgttgcgcgagaagattgtgcaccgccgctttacaggcttcgacgccgcttcgttctaccatcgacaccaccacgctggcacccagttgatcggcgcgagatttaatcgccgcgacaatttgcgacggcgcgtgcagggccagactggaggtggcaacgccaatcagcaacgactgtttgcccgccagttgttgtgccacgcggttgggaatgtaattcagctccgccatcgccgcttccactttttcccgcgttttcgcagaaacgtggctggcctggttcaccacgcgggaaacggtctgataagagacaccggcatactctgcgacatcgtataacgttactggtttcacattcaccaccctgaattgactctcttccgggcgctatcatgccataccgcgaaaggttttgcgccattcgatggtgtccgggatctcgacgctctcccttatgcgactcctgctaatacgactcactatagggtactaatagcgccgcagttcatgctctttaagagtctctgtactgtggaaaatctgggttagtttgacggttggaaaaccgttttgctttctgaccctggtagctgcccgcttctcatgctctgacttttcacgttatgtggaaaaagtaacgtaatttcgttagttaagacttaccgtaaaaagtcagttctgatgctgctgtcgcaagacaggataggtgcgctcccagcaaaaggagtatgtcttgaaaaagactagccgttctagtaacggtgcggattaccgcagtggtggctactgaatcacccccttcgtcgggggaaccctccaaaaggtgggttgaaagatatgtaaggaatatgacagtttgtaccctagcataaccccttggggcctctaaacgggtcttgaggggttttttggtcgaacagaaagtaatcgtattgtacacggccgcataatcgaaattaatacgactcactataggggaattgtgagcggataacaattccccatcttagtatattagttaagtataagaaggagatatacatatgagcacaatcacgattcaatgccgcctagttgcagaagaagcgaccctgcgctacttttgggaacttatggctgagaagaatacgccactcattaatgaattgttggagcagttaggacaacatccagattttgatacttgggtacaagcaggcaagatgcctgaaaagacagttgagaacttgtgcaagtccctagaagatcgagaaccttttgcaaatcagcccggtcgttttcgtacttcggcagttgctctggtaaagtacatttacaaatcctggtttgcgttacaaaaacgtcgggcggacagactagaaggtaaagagcgctggttaaagatgctcaaaagtgatgtggaactggaacgagaaagcaactgtagtttggatattattcgagctaaagctggggaaattcttgctaaagttactgaggggtgcgctccgagcaatcaaacatcctctaagagaaaaaagaagaaaactaaaaaaagccaagcgacaaaagatctccctacgcttttcgagattatattaaaggcttacgaacaagctgaagaaagcctgacacgagctgcccttgcttatctccttaaaaatgactgtgaagtcagtgaagttgatgaagattcagagaaatttaaaaagcgtcggcgtaaaaaggaaatagaaattgaacgtttaagaaatcaactgaaaagtcggatacctaaaggtcgcgatttaaccggagataagtggttgaaaacgctagaagaagccacccgaaatgttcctgaaaatgaggatgaggcaaaggcttggcaagcccaactcttgagagaagctagttctgttccttttcctgtagcttatgaaactagtgaagatatgacttggtttaccaacgagcaaggtcgaatctttgtttactttaatggttcagccaaacataaatttcaagtttattgcgatcgccgtcaacttcattggtttcaacgttttgtagaggactttcaaatcaagaaaaatggtgataaaaaaggtagcgaaaaggagtaccctgctgggttattgacgctttgttccactcgtctgagatggaaagaaagcgcggaaaaaggagatccttggaatgttcatcgcctaattctttcttgcactatcgatacacgcttatggacacttgaaggaacggaacaggtgcgagctgaaaagatcgctcaggttgaaaaaactattagcaagcgggagcaagaagttaatctgagtaagactcaacttgagcgtttacaagccaagcacagtgagagggagagattgaacaacatttttcccaaccgccctagcaagcccagttaccggggtaaatctcatattgcgatcggtgtaagtttcagtttggaaaacccagccactgttgccgtcgtagatgttgcaaccaagaaagtccttacttaccgcagtttcaaacaattactcggagataactacaaccttgcaaaccggctgcggcaacaaaagcaacgtctttctcacgaacgtcacaaagctcagaaacaaggcgcaccaaattcatttggagactcagagttagggcagtatgtagacagattgcttgcaaaatcgattgtcgcgatcgcaaaaacttatcaagctagtagtattgtcttgcctaaacttcgctatatgagggaaatcatacataatgaagttcaagctaaagccgaaaaaaagattccaggatataaagaaggtcaaaaacaatatgccaaacagtatcggataagcgttcatcaatggagttataatagattatcacagattcttgaaagccaagctacaaaagctggaatttctattgaacgtggatcgcaagtaatccaaggtagctcccaagaacaagcacgagatttagctttatttgcctataacgaacgccaacttagtctgggttagtaacctttaataaggagatataccatgggcttagacgaagaatttgagttcactgaggaattgacgcaagctccagatgttattgtgcttgacaagagtcattttgtggtagacccatcccaaattattctgcaaacatcggataagcataaactgagatttaatcttatcaagtggttcgctgaatcccccaacattactattaaatctcagagaaaacaggcagtcgtagatacccttggtgtttctactcggcaggtggagcgtctcctcaagcaatatcataatggtgagttatcagagacagcgggagtacaacgctcagataaggggaaacttcgcatcagccaatactgggaagattatattaaaacaacttatgaaaaaagtctgaaagataaacatccaatgttgccagcagctgtcgtgcgggaagtgaagcgacacgcgatcgttgacctcggactgaaaccaggagattatccccatccagccaccatctatagaaatttagctcctttaatcgagcaacacacgcggaagaaaaaagttagaaatccgggttcgggatcttggctgaccgttgtcacgcgagatggtcagctactgaaggctgactttagtaaccaaattatccaatgcgaccataccgagctggatattcatatagttgatagtcatggcagtttattgtctgaccgtccttggctaactactgttgtcgatacttattcaagttgcattcttggttttcatttatggatcaaacaaccaggttctacggaggtagctcttgccttgagacacgccattctacccaaaaattatccagaggactacaaacttggcaaagtttgggaaatatatggacctccttttcagtatttttttactgatggtggaaaagattttaattcaaagcatctaaaagccattggtaagaaattaggatttcagtgcgaactacgcaatcgcccgccccaaggtggaattgtagaacgtctttttaaaaccattaatactcaagttcttaaagagcttcccggttacacgggggcaaacgttcaagaacgcccgaaaaatgcagagaaagaagcctgtttaacaatacaggatttggataaaattctagccagcttcttttgtgatatttataaccacgaaccctatcccaaggagcctcgcaacacgagatttgaacgctggtttaaaggtatggggggaaaattacccgaacctttggacgagcgagaattggatatttgtttgatgaaagaagcacaacgagttgttcaagctcatggtagcatacagtttgaaaacctaatttatcgaggagaagctctgaaggcatatagaggtgaatacgtcaccctaagatacgatcccgaccatgtcctgactttatatgtctatagttgcgaagctgatgataatgcagaagagttcttgggctatgctcacgctataaacatggatactcatgacttgagtatagaagaattgaaaactctcaataaagaacgaagtaaagctcgtagcgatcattacaactatgatgctttattagcattgggtaaacgcaaagaacttgtagaagaaagaaaacaagacaagaaagcaaaaaggcaatcagagcaaaaacgtctccgcactgcttccaagaaaaactcaaatgttattgaactacgcaaaagtagagcttcgagttcttcaagtaaagatgaccgacaggaaattttaccagagagagtttctagggacgaactaaagccggagaaaacagaactgaaatatgaggaaaatctgttagcacagaccgatactcaaaaacaggagagacataagttagttgtctctgaccgtaaaaaaaatttaaagaacatttggtgataaaggaggtaaataatggccatatctcaactggcaacccaaccatttgtcgaagtcttacctccagagttagatagcaaagctcaaattgctaaaactattgatattgaggagcttttcagaattaattttatcacaaccgatcggtcatcagaatgtttcagatggttagatgagctgcgtatcctgaaacaatgcggtcggatcattggaccaagaaatgtaggcaaaagccgagcagtgcttcactatcgtaatgaggataaaaaacgagtttcttatgtaaaggcttggtcggcatcgagttctaaacgtctattttcacaaatcttaaaggatattaaccatgctgcatcaacaggtaaacgacaggatttacgtccaagattagctggtagtcttgaactatttggattagaattggtcattgttgataatgctgaaaatcttcaaaaagaggcgctcttagatttaaagcaactttttgaagaatgccatgttcctattgtcttagttggaggtaaggagttagatgatattttagaagattttgatttgttgactaactttccaacgttatatgagtttgaacgattggaacatgatgattttataaaaacattaaagacaatcgaattggatattttatctcttccagaagcgtctaagttaagtgagggtaacatatttgcaattttagctgagagtacaggtgggaaaataggaattttagtcaagatactaactaaagcagttttacattctcttaaaaagggatttggtaaagttgatgaaagcattttagaaaaaatcgcaagtcgttatggaacaaaatacgttcccattgaaaacaaaaatagaaacgattaatagaggaggatataaatgattgaagatgatgaaattcgtctaaggttgggctatgttgaaccacacccaggtgaaagcatcagtcattatttgggacggcttcgtcgatttaaggctaacagccttccttcaggatatgctctaggaaaaattgcgggtcttgggtctgttctgactcgatgggaaaagttgtacttcaacccatttcccactcaacaagaactagaggcattagcacaagtgattcaagtggaggttgagaaattaagagagatgctacccactaaaggtgtcacaatgatgcctcgacccattcgattatgtgcggcttgctatgcagagtcaccttatcaccggatcgagtggcagtttaaggacaaaatgaagtgcgatcgccatcagttgcgcttattaacaaaatgcacaaactgtcagacaccattccccattcctgctgattgggaaaaaggagaatgctcgcattgttttttgtcttttgctaagatggtgaagtgtcaaaagcgtcgttagtaacctaggctgctgccaccgctgagcaataactagcataaccccttggggcctctaaacgggtcttgaggggttttttgctgaaacctcaggcatttgagaagcacacggtcacactgcttccggtagtcaataaaccggtaaaccagcaatagacataagcggctatttaacgaccctgccctgaaccgacgaccgggtcatcgtggccggatcttgcggcccctcggcttgaacgaattgttagacattatttgccgactaccttggtgatctcgcctttcacgtagtggacaaattcttccaactgatctgcgcgcgaggccaagcgatcttcttcttgtccaagataagcctgtctagcttcaagtatgacgggctgatactgggccggcaggcgctccattgcccagtcggcagcgacatccttcggcgcgattttgccggttactgcgctgtaccaaatgcgggacaacgtaagcactacatttcgctcatcgccagcccagtcgggcggcgagttccatagcgttaaggtttcatttagcgcctcaaatagatcctgttcaggaaccggatcaaagagttcctccgccgctggacctaccaaggcaacgctatgttctcttgcttttgtcagcaagatagccagatcaatgtcgatcgtggctggctcgaagatacctgcaagaatgtcattgcgctgccattctccaaattgcagttcgcgcttagctggataacgccacggaatgatgtcgtcgtgcacaacaatggtgacttctacagcgcggagaatctcgctctctccaggggaagccgaagtttccaaaaggtcgttgatcaaagctcgccgcgttgtttcatcaagccttacggtcaccgtaaccagcaaatcaatatcactgtgtggcttcaggccgccatccactgcggagccgtacaaatgtacggccagcaacgtcggttcgagatggcgctcgatgacgccaactacctctgatagttgagtcgatacttcggcgatcaccgcttccctcatactcttcctttttcaatattattgaagcatttatcagggttattgtctcatgagcggatacatatttgaatgtatttagaaaaataaacaaatagctagctcactcggtcgctacgctccgggcgtgagactgcggcgggcgctgcggacacatacaaagttacccacagattccgtggataagcaggggactaacatgtgaggcaaaacagcagggccgcgccggtggcgtttttccataggctccgccctcctgccagagttcacataaacagacgcttttccggtgcatctgtgggagccgtgaggctcaaccatgaatctgacagtacgggcgaaacccgacaggacttaaagatccccaccgtttccggcgggtcgctccctcttgcgctctcctgttccgaccctgccgtttaccggatacctgttccgcctttctcccttacgggaagtgtggcgctttctcatagctcacacactggtatctcggctcggtgtaggtcgttcgctccaagctgggctgtaagcaagaactccccgttcagcccgactgctgcgccttatccggtaactgttcacttgagtccaacccggaaaagcacggtaaaacgccactggcagcagccattggtaactgggagttcgcagaggatttgtttagctaaacacgcggttgctcttgaagtgtgcgccaaagtccggctacactggaaggacagatttggttgctgtgctctgcgaaagccagttaccacggttaagcagttccccaactgacttaaccttcgatcaaaccacctccccaggtggttttttcgtttacagggcaaaagattacgcgcagaaaaaaaggatctcaagaagatcctttgatc

SEQ ID NO: 65 - DNA, 10375 bp, artificial sequence
  Synthetic
ttttctactgaaccgctctagatttcagtgcaatttatctcttcaaatgtagcacctgaagtcagccccatacgatataagttgtaattctcatgttagtcatgccccgcgcccaccggaaggagctgactgggttgaaggctctcaagggcatcggtcgagatcccggtgcctaatgagtgagctaacttacattaattgcgttgcgctcactgcccgctttccagtcgggaaacctgtcgtgccagctgcattaatgaatcggccaacgcgcggggagaggcggtttgcgtattgggcgccagggtggtttttcttttcaccagtgagacgggcaacagctgattgcccttcaccgcctggccctgagagagttgcagcaagcggtccacgctggtttgccccagcaggcgaaaatcctgtttgatggtggttaacggcgggatataacatgagctgtcttcggtatcgtcgtatcccactaccgagatgtccgcaccaacgcgcagcccggactcggtaatggcgcgcattgcgcccagcgccatctgatcgttggcaaccagcatcgcagtgggaacgatgccctcattcagcatttgcatggtttgttgaaaaccggacatggcactccagtcgccttcccgttccgctatcggctgaatttgattgcgagtgagatatttatgccagccagccagacgcagacgcgccgagacagaacttaatgggcccgctaacagcgcgatttgctggtgacccaatgcgaccagatgctccacgcccagtcgcgtaccgtcttcatgggagaaaataatactgttgatgggtgtctggtcagagacatcaagaaataacgccggaacattagtgcaggcagcttccacagcaatggcatcctggtcatccagcggatagttaatgatcagcccactgacgcgttgcgcgagaagattgtgcaccgccgctttacaggcttcgacgccgcttcgttctaccatcgacaccaccacgctggcacccagttgatcggcgcgagatttaatcgccgcgacaatttgcgacggcgcgtgcagggccagactggaggtggcaacgccaatcagcaacgactgtttgcccgccagttgttgtgccacgcggttgggaatgtaattcagctccgccatcgccgcttccactttttcccgcgttttcgcagaaacgtggctggcctggttcaccacgcgggaaacggtctgataagagacaccggcatactctgcgacatcgtataacgttactggtttcacattcaccaccctgaattgactctcttccgggcgctatcatgccataccgcgaaaggttttgcgccattcgatggtgtccgggatctcgacgctctcccttatgcgactcctgctaatacgactcactatagggtactaatagcgccgcagttcatgctctttaagagtctctgtactgtggaaaatctgggttagtttgacggttggaaaaccgttttgctttctgaccctggtagctgcccgcttctcatgctctgacttttcacgttatgtggaaaaagtaacgtaatttcgttagttaagacttaccgtaaaaagtcagttctgatgctgctgtcgcaagacaggataggtgcgctcccagcaaaaggagtatgtcttgaaaaagactagccgttctagtaacggtgcggattaccgcagtggtggctactgaatcacccccttcgtcgggggaaccctccaaaaggtgggttgaaagcagcgcggctgaaatcatcattagtaccctagcataaccccttggggcctctaaacgggtcttgaggggttttttggtcgaacagaaagtaatcgtattgtacacggccgcataatcgaaattaatacgactcactataggggaattgtgagcggataacaattccccatcttagtatattagttaagtataagaaggagatatacatatgagcacaatcacgattcaatgccgcctagttgcagaagaagcgaccctgcgctacttttgggaacttatggctgagaagaatacgccactcattaatgaattgttggagcagttaggacaacatccagattttgatacttgggtacaagcaggcaagatgcctgaaaagacagttgagaacttgtgcaagtccctagaagatcgagaaccttttgcaaatcagcccggtcgttttcgtacttcggcagttgctctggtaaagtacatttacaaatcctggtttgcgttacaaaaacgtcgggcggacagactagaaggtaaagagcgctggttaaagatgctcaaaagtgatgtggaactggaacgagaaagcaactgtagtttggatattattcgagctaaagctggggaaattcttgctaaagttactgaggggtgcgctccgagcaatcaaacatcctctaagagaaaaaagaagaaaactaaaaaaagccaagcgacaaaagatctccctacgcttttcgagattatattaaaggcttacgaacaagctgaagaaagcctgacacgagctgcccttgcttatctccttaaaaatgactgtgaagtcagtgaagttgatgaagattcagagaaatttaaaaagcgtcggcgtaaaaaggaaatagaaattgaacgtttaagaaatcaactgaaaagtcggatacctaaaggtcgcgatttaaccggagataagtggttgaaaacgctagaagaagccacccgaaatgttcctgaaaatgaggatgaggcaaaggcttggcaagcccaactcttgagagaagctagttctgttccttttcctgtagcttatgaaactagtgaagatatgacttggtttaccaacgagcaaggtcgaatctttgtttactttaatggttcagccaaacataaatttcaagtttattgcgatcgccgtcaacttcattggtttcaacgttttgtagaggactttcaaatcaagaaaaatggtgataaaaaaggtagcgaaaaggagtaccctgctgggttattgacgctttgttccactcgtctgagatggaaagaaagcgcggaaaaaggagatccttggaatgttcatcgcctaattctttcttgcactatcgatacacgcttatggacacttgaaggaacggaacaggtgcgagctgaaaagatcgctcaggttgaaaaaactattagcaagcgggagcaagaagttaatctgagtaagactcaacttgagcgtttacaagccaagcacagtgagagggagagattgaacaacatttttcccaaccgccctagcaagcccagttaccggggtaaatctcatattgcgatcggtgtaagtttcagtttggaaaacccagccactgttgccgtcgtagatgttgcaaccaagaaagtccttacttaccgcagtttcaaacaattactcggagataactacaaccttgcaaaccggctgcggcaacaaaagcaacgtctttctcacgaacgtcacaaagctcagaaacaaggcgcaccaaattcatttggagactcagagttagggcagtatgtagacagattgcttgcaaaatcgattgtcgcgatcgcaaaaacttatcaagctagtagtattgtcttgcctaaacttcgctatatgagggaaatcatacataatgaagttcaagctaaagccgaaaaaaagattccaggatataaagaaggtcaaaaacaatatgccaaacagtatcggataagcgttcatcaatggagttataatagattatcacagattcttgaaagccaagctacaaaagctggaatttctattgaacgtggatcgcaagtaatccaaggtagctcccaagaacaagcacgagatttagctttatttgcctataacgaacgccaacttagtctgggttagtaacctttaataaggagatataccatgggcttagacgaagaatttgagttcactgaggaattgacgcaagctccagatgttattgtgcttgacaagagtcattttgtggtagacccatcccaaattattctgcaaacatcggataagcataaactgagatttaatcttatcaagtggttcgctgaatcccccaacattactattaaatctcagagaaaacaggcagtcgtagatacccttggtgtttctactcggcaggtggagcgtctcctcaagcaatatcataatggtgagttatcagagacagcgggagtacaacgctcagataaggggaaacttcgcatcagccaatactgggaagattatattaaaacaacttatgaaaaaagtctgaaagataaacatccaatgttgccagcagctgtcgtgcgggaagtgaagcgacacgcgatcgttgacctcggactgaaaccaggagattatccccatccagccaccatctatagaaatttagctcctttaatcgagcaacacacgcggaagaaaaaagttagaaatccgggttcgggatcttggctgaccgttgtcacgcgagatggtcagctactgaaggctgactttagtaaccaaattatccaatgcgaccataccgagctggatattcatatagttgatagtcatggcagtttattgtctgaccgtccttggctaactactgttgtcgatacttattcaagttgcattcttggttttcatttatggatcaaacaaccaggttctacggaggtagctcttgccttgagacacgccattctacccaaaaattatccagaggactacaaacttggcaaagtttgggaaatatatggacctccttttcagtatttttttactgatggtggaaaagattttaattcaaagcatctaaaagccattggtaagaaattaggatttcagtgcgaactacgcaatcgcccgccccaaggtggaattgtagaacgtctttttaaaaccattaatactcaagttcttaaagagcttcccggttacacgggggcaaacgttcaagaacgcccgaaaaatgcagagaaagaagcctgtttaacaatacaggatttggataaaattctagccagcttcttttgtgatatttataaccacgaaccctatcccaaggagcctcgcaacacgagatttgaacgctggtttaaaggtatggggggaaaattacccgaacctttggacgagcgagaattggatatttgtttgatgaaagaagcacaacgagttgttcaagctcatggtagcatacagtttgaaaacctaatttatcgaggagaagctctgaaggcatatagaggtgaatacgtcaccctaagatacgatcccgaccatgtcctgactttatatgtctatagttgcgaagctgatgataatgcagaagagttcttgggctatgctcacgctataaacatggatactcatgacttgagtatagaagaattgaaaactctcaataaagaacgaagtaaagctcgtagcgatcattacaactatgatgctttattagcattgggtaaacgcaaagaacttgtagaagaaagaaaacaagacaagaaagcaaaaaggcaatcagagcaaaaacgtctccgcactgcttccaagaaaaactcaaatgttattgaactacgcaaaagtagagcttcgagttcttcaagtaaagatgaccgacaggaaattttaccagagagagtttctagggacgaactaaagccggagaaaacagaactgaaatatgaggaaaatctgttagcacagaccgatactcaaaaacaggagagacataagttagttgtctctgaccgtaaaaaaaatttaaagaacatttggtgataaaggaggtaaataatggccatatctcaactggcaacccaaccatttgtcgaagtcttacctccagagttagatagcaaagctcaaattgctaaaactattgatattgaggagcttttcagaattaattttatcacaaccgatcggtcatcagaatgtttcagatggttagatgagctgcgtatcctgaaacaatgcggtcggatcattggaccaagaaatgtaggcaaaagccgagcagtgcttcactatcgtaatgaggataaaaaacgagtttcttatgtaaaggcttggtcggcatcgagttctaaacgtctattttcacaaatcttaaaggatattaaccatgctgcatcaacaggtaaacgacaggatttacgtccaagattagctggtagtcttgaactatttggattagaattggtcattgttgataatgctgaaaatcttcaaaaagaggcgctcttagatttaaagcaactttttgaagaatgccatgttcctattgtcttagttggaggtaaggagttagatgatattttagaagattttgatttgttgactaactttccaacgttatatgagtttgaacgattggaacatgatgattttataaaaacattaaagacaatcgaattggatattttatctcttccagaagcgtctaagttaagtgagggtaacatatttgcaattttagctgagagtacaggtgggaaaataggaattttagtcaagatactaactaaagcagttttacattctcttaaaaagggatttggtaaagttgatgaaagcattttagaaaaaatcgcaagtcgttatggaacaaaatacgttcccattgaaaacaaaaatagaaacgattaatagaggaggatataaatgattgaagatgatgaaattcgtctaaggttgggctatgttgaaccacacccaggtgaaagcatcagtcattatttgggacggcttcgtcgatttaaggctaacagccttccttcaggatatgctctaggaaaaattgcgggtcttgggtctgttctgactcgatgggaaaagttgtacttcaacccatttcccactcaacaagaactagaggcattagcacaagtgattcaagtggaggttgagaaattaagagagatgctacccactaaaggtgtcacaatgatgcctcgacccattcgattatgtgcggcttgctatgcagagtcaccttatcaccggatcgagtggcagtttaaggacaaaatgaagtgcgatcgccatcagttgcgcttattaacaaaatgcacaaactgtcagacaccattccccattcctgctgattgggaaaaaggagaatgctcgcattgttttttgtcttttgctaagatggtgaagtgtcaaaagcgtcgttagtaacctaggctgctgccaccgctgagcaataactagcataaccccttggggcctctaaacgggtcttgaggggttttttgctgaaacctcaggcatttgagaagcacacggtcacactgcttccggtagtcaataaagcctgcagcaaagactacctacttaaatgaaccgcaaatgtacattcgcaaattaaatgtcgtaattcgcaaatttgtgtcgtttttcgcaaattaatgtcgtttagaatagtttgtctcatcaattcaattataggaacttttcgcaaattaatgtcgtcctgtttctccatttagtgtcgattaacaaattaatgtcgctgttaacgaattaatgtcgtcgaattagttccaactaacgttaacaaattaatgtcgtctaacataatgtcttgctaggatccatggagaaaaaaatcactggatataccaccgttgatatatcccaatggcatcgtaaagaacattttgaggcatttcagtcagttgctcaatgtacctataaccagaccgttcagctggatattacggcctttttaaagaccgtaaagaaaaataagcacaagttttatccggcctttattcacattcttgcccgcctgatgaatgctcatccggagttccgtatggcaatgaaagacggtgagctggtgatatgggatagtgttcacccttgttacaccgttttccatgagcaaactgaaacgttttcatcgctctggagtgaataccacgacgatttccggcagtttctacacatatattcgcaagatgtggcgtgttacggtgaaaacctggcctatttccctaaagggtttattgagaatatgtttttcgtctcagccaatccctgggtgagtttcaccagttttgatttaaacgtggccaatatggacaacttcttcgcccccgttttcactatgggcaaatattatacgcaaggcgacaaggtgctgatgccgctggcgattcaggttcatcatgccgtttgtgatggcttccatgtcggcagaatgcttaatgaattacaacagtactgcgatgagtggcagggcggggcgtaatttttttaaggcagttattggtgcccttctagaaaaaccactgattaacactttaggtactaaagtaccactaatgtggcaaaaatgcgacatctaatttgcgaaacaggcaaatcttaataaacgacatttaatttgcgaaaataggatttgcgacatctaatttgcgaaacaggcaaattactcagttttatggataaatagcttgtaagtcctacgcaataaagatctcagctattagaagtaattgcgacactaatttgcgaattgcgacatataatttgcgaatgtacaccaagctttaaaccagcaatagacataagcggctatttaacgaccctgccctgaaccgacgaccgggtcatcgtggccggatcttgcggcccctcggcttgaacgaattgttagacattatttgccgactaccttggtgatctcgcctttcacgtagtggacaaattcttccaactgatctgcgcgcgaggccaagcgatcttcttcttgtccaagataagcctgtctagcttcaagtatgacgggctgatactgggccggcaggcgctccattgcccagtcggcagcgacatccttcggcgcgattttgccggttactgcgctgtaccaaatgcgggacaacgtaagcactacatttcgctcatcgccagcccagtcgggcggcgagttccatagcgttaaggtttcatttagcgcctcaaatagatcctgttcaggaaccggatcaaagagttcctccgccgctggacctaccaaggcaacgctatgttctcttgcttttgtcagcaagatagccagatcaatgtcgatcgtggctggctcgaagatacctgcaagaatgtcattgcgctgccattctccaaattgcagttcgcgcttagctggataacgccacggaatgatgtcgtcgtgcacaacaatggtgacttctacagcgcggagaatctcgctctctccaggggaagccgaagtttccaaaaggtcgttgatcaaagctcgccgcgttgtttcatcaagccttacggtcaccgtaaccagcaaatcaatatcactgtgtggcttcaggccgccatccactgcggagccgtacaaatgtacggccagcaacgtcggttcgagatggcgctcgatgacgccaactacctctgatagttgagtcgatacttcggcgatcaccgcttccctcatactcttcctttttcaatattattgaagcatttatcagggttattgtctcatgagcggatacatatttgaatgtatttagaaaaataaacaaatagctagctcactcggtcgctacgctccgggcgtgagactgcggcgggcgctgcggacacatacaaagttacccacagattccgtggataagcaggggactaacatgtgaggcaaaacagcagggccgcgccggtggcgtttttccataggctccgccctcctgccagagttcacataaacagacgcttttccggtgcatctgtgggagccgtgaggctcaaccatgaatctgacagtacgggcgaaacccgacaggacttaaagatccccaccgtttccggcgggtcgctccctcttgcgctctcctgttccgaccctgccgtttaccggatacctgttccgcctttctcccttacgggaagtgtggcgctttctcatagctcacacactggtatctcggctcggtgtaggtcgttcgctccaagctgggctgtaagcaagaactccccgttcagcccgactgctgcgccttatccggtaactgttcacttgagtccaacccggaaaagcacggtaaaacgccactggcagcagccattggtaactgggagttcgcagaggatttgtttagctaaacacgcggttgctcttgaagtgtgcgccaaagtccggctacactggaaggacagatttggttgctgtgctctgcgaaagccagttaccacggttaagcagttccccaactgacttaaccttcgatcaaaccacctccccaggtggttttttcgtttacagggcaaaagattacgcgcagaaaaaaaggatctcaagaagatcctttgatc

SEQ ID NO: 66 - DNA, 10375 bp, artificial sequence
  Synthetic
ttttctactgaaccgctctagatttcagtgcaatttatctcttcaaatgtagcacctgaagtcagccccatacgatataagttgtaattctcatgttagtcatgccccgcgcccaccggaaggagctgactgggttgaaggctctcaagggcatcggtcgagatcccggtgcctaatgagtgagctaacttacattaattgcgttgcgctcactgcccgctttccagtcgggaaacctgtcgtgccagctgcattaatgaatcggccaacgcgcggggagaggcggtttgcgtattgggcgccagggtggtttttcttttcaccagtgagacgggcaacagctgattgcccttcaccgcctggccctgagagagttgcagcaagcggtccacgctggtttgccccagcaggcgaaaatcctgtttgatggtggttaacggcgggatataacatgagctgtcttcggtatcgtcgtatcccactaccgagatgtccgcaccaacgcgcagcccggactcggtaatggcgcgcattgcgcccagcgccatctgatcgttggcaaccagcatcgcagtgggaacgatgccctcattcagcatttgcatggtttgttgaaaaccggacatggcactccagtcgccttcccgttccgctatcggctgaatttgattgcgagtgagatatttatgccagccagccagacgcagacgcgccgagacagaacttaatgggcccgctaacagcgcgatttgctggtgacccaatgcgaccagatgctccacgcccagtcgcgtaccgtcttcatgggagaaaataatactgttgatgggtgtctggtcagagacatcaagaaataacgccggaacattagtgcaggcagcttccacagcaatggcatcctggtcatccagcggatagttaatgatcagcccactgacgcgttgcgcgagaagattgtgcaccgccgctttacaggcttcgacgccgcttcgttctaccatcgacaccaccacgctggcacccagttgatcggcgcgagatttaatcgccgcgacaatttgcgacggcgcgtgcagggccagactggaggtggcaacgccaatcagcaacgactgtttgcccgccagttgttgtgccacgcggttgggaatgtaattcagctccgccatcgccgcttccactttttcccgcgttttcgcagaaacgtggctggcctggttcaccacgcgggaaacggtctgataagagacaccggcatactctgcgacatcgtataacgttactggtttcacattcaccaccctgaattgactctcttccgggcgctatcatgccataccgcgaaaggttttgcgccattcgatggtgtccgggatctcgacgctctcccttatgcgactcctgctaatacgactcactatagggtactaatagcgccgcagttcatgctctttaagagtctctgtactgtggaaaatctgggttagtttgacggttggaaaaccgttttgctttctgaccctggtagctgcccgcttctcatgctctgacttttcacgttatgtggaaaaagtaacgtaatttcgttagttaagacttaccgtaaaaagtcagttctgatgctgctgtcgcaagacaggataggtgcgctcccagcaaaaggagtatgtcttgaaaaagactagccgttctagtaacggtgcggattaccgcagtggtggctactgaatcacccccttcgtcgggggaaccctccaaaaggtgggttgaaagttcgacgttcagacgtagtgtgagtaccctagcataaccccttggggcctctaaacgggtcttgaggggttttttggtcgaacagaaagtaatcgtattgtacacggccgcataatcgaaattaatacgactcactataggggaattgtgagcggataacaattccccatcttagtatattagttaagtataagaaggagatatacatatgagcacaatcacgattcaatgccgcctagttgcagaagaagcgaccctgcgctacttttgggaacttatggctgagaagaatacgccactcattaatgaattgttggagcagttaggacaacatccagattttgatacttgggtacaagcaggcaagatgcctgaaaagacagttgagaacttgtgcaagtccctagaagatcgagaaccttttgcaaatcagcccggtcgttttcgtacttcggcagttgctctggtaaagtacatttacaaatcctggtttgcgttacaaaaacgtcgggcggacagactagaaggtaaagagcgctggttaaagatgctcaaaagtgatgtggaactggaacgagaaagcaactgtagtttggatattattcgagctaaagctggggaaattcttgctaaagttactgaggggtgcgctccgagcaatcaaacatcctctaagagaaaaaagaagaaaactaaaaaaagccaagcgacaaaagatctccctacgcttttcgagattatattaaaggcttacgaacaagctgaagaaagcctgacacgagctgcccttgcttatctccttaaaaatgactgtgaagtcagtgaagttgatgaagattcagagaaatttaaaaagcgtcggcgtaaaaaggaaatagaaattgaacgtttaagaaatcaactgaaaagtcggatacctaaaggtcgcgatttaaccggagataagtggttgaaaacgctagaagaagccacccgaaatgttcctgaaaatgaggatgaggcaaaggcttggcaagcccaactcttgagagaagctagttctgttccttttcctgtagcttatgaaactagtgaagatatgacttggtttaccaacgagcaaggtcgaatctttgtttactttaatggttcagccaaacataaatttcaagtttattgcgatcgccgtcaacttcattggtttcaacgttttgtagaggactttcaaatcaagaaaaatggtgataaaaaaggtagcgaaaaggagtaccctgctgggttattgacgctttgttccactcgtctgagatggaaagaaagcgcggaaaaaggagatccttggaatgttcatcgcctaattctttcttgcactatcgatacacgcttatggacacttgaaggaacggaacaggtgcgagctgaaaagatcgctcaggttgaaaaaactattagcaagcgggagcaagaagttaatctgagtaagactcaacttgagcgtttacaagccaagcacagtgagagggagagattgaacaacatttttcccaaccgccctagcaagcccagttaccggggtaaatctcatattgcgatcggtgtaagtttcagtttggaaaacccagccactgttgccgtcgtagatgttgcaaccaagaaagtccttacttaccgcagtttcaaacaattactcggagataactacaaccttgcaaaccggctgcggcaacaaaagcaacgtctttctcacgaacgtcacaaagctcagaaacaaggcgcaccaaattcatttggagactcagagttagggcagtatgtagacagattgcttgcaaaatcgattgtcgcgatcgcaaaaacttatcaagctagtagtattgtcttgcctaaacttcgctatatgagggaaatcatacataatgaagttcaagctaaagccgaaaaaaagattccaggatataaagaaggtcaaaaacaatatgccaaacagtatcggataagcgttcatcaatggagttataatagattatcacagattcttgaaagccaagctacaaaagctggaatttctattgaacgtggatcgcaagtaatccaaggtagctcccaagaacaagcacgagatttagctttatttgcctataacgaacgccaacttagtctgggttagtaacctttaataaggagatataccatgggcttagacgaagaatttgagttcactgaggaattgacgcaagctccagatgttattgtgcttgacaagagtcattttgtggtagacccatcccaaattattctgcaaacatcggataagcataaactgagatttaatcttatcaagtggttcgctgaatcccccaacattactattaaatctcagagaaaacaggcagtcgtagatacccttggtgtttctactcggcaggtggagcgtctcctcaagcaatatcataatggtgagttatcagagacagcgggagtacaacgctcagataaggggaaacttcgcatcagccaatactgggaagattatattaaaacaacttatgaaaaaagtctgaaagataaacatccaatgttgccagcagctgtcgtgcgggaagtgaagcgacacgcgatcgttgacctcggactgaaaccaggagattatccccatccagccaccatctatagaaatttagctcctttaatcgagcaacacacgcggaagaaaaaagttagaaatccgggttcgggatcttggctgaccgttgtcacgcgagatggtcagctactgaaggctgactttagtaaccaaattatccaatgcgaccataccgagctggatattcatatagttgatagtcatggcagtttattgtctgaccgtccttggctaactactgttgtcgatacttattcaagttgcattcttggttttcatttatggatcaaacaaccaggttctacggaggtagctcttgccttgagacacgccattctacccaaaaattatccagaggactacaaacttggcaaagtttgggaaatatatggacctccttttcagtatttttttactgatggtggaaaagattttaattcaaagcatctaaaagccattggtaagaaattaggatttcagtgcgaactacgcaatcgcccgccccaaggtggaattgtagaacgtctttttaaaaccattaatactcaagttcttaaagagcttcccggttacacgggggcaaacgttcaagaacgcccgaaaaatgcagagaaagaagcctgtttaacaatacaggatttggataaaattctagccagcttcttttgtgatatttataaccacgaaccctatcccaaggagcctcgcaacacgagatttgaacgctggtttaaaggtatggggggaaaattacccgaacctttggacgagcgagaattggatatttgtttgatgaaagaagcacaacgagttgttcaagctcatggtagcatacagtttgaaaacctaatttatcgaggagaagctctgaaggcatatagaggtgaatacgtcaccctaagatacgatcccgaccatgtcctgactttatatgtctatagttgcgaagctgatgataatgcagaagagttcttgggctatgctcacgctataaacatggatactcatgacttgagtatagaagaattgaaaactctcaataaagaacgaagtaaagctcgtagcgatcattacaactatgatgctttattagcattgggtaaacgcaaagaacttgtagaagaaagaaaacaagacaagaaagcaaaaaggcaatcagagcaaaaacgtctccgcactgcttccaagaaaaactcaaatgttattgaactacgcaaaagtagagcttcgagttcttcaagtaaagatgaccgacaggaaattttaccagagagagtttctagggacgaactaaagccggagaaaacagaactgaaatatgaggaaaatctgttagcacagaccgatactcaaaaacaggagagacataagttagttgtctctgaccgtaaaaaaaatttaaagaacatttggtgataaaggaggtaaataatggccatatctcaactggcaacccaaccatttgtcgaagtcttacctccagagttagatagcaaagctcaaattgctaaaactattgatattgaggagcttttcagaattaattttatcacaaccgatcggtcatcagaatgtttcagatggttagatgagctgcgtatcctgaaacaatgcggtcggatcattggaccaagaaatgtaggcaaaagccgagcagtgcttcactatcgtaatgaggataaaaaacgagtttcttatgtaaaggcttggtcggcatcgagttctaaacgtctattttcacaaatcttaaaggatattaaccatgctgcatcaacaggtaaacgacaggatttacgtccaagattagctggtagtcttgaactatttggattagaattggtcattgttgataatgctgaaaatcttcaaaaagaggcgctcttagatttaaagcaactttttgaagaatgccatgttcctattgtcttagttggaggtaaggagttagatgatattttagaagattttgatttgttgactaactttccaacgttatatgagtttgaacgattggaacatgatgattttataaaaacattaaagacaatcgaattggatattttatctcttccagaagcgtctaagttaagtgagggtaacatatttgcaattttagctgagagtacaggtgggaaaataggaattttagtcaagatactaactaaagcagttttacattctcttaaaaagggatttggtaaagttgatgaaagcattttagaaaaaatcgcaagtcgttatggaacaaaatacgttcccattgaaaacaaaaatagaaacgattaatagaggaggatataaatgattgaagatgatgaaattcgtctaaggttgggctatgttgaaccacacccaggtgaaagcatcagtcattatttgggacggcttcgtcgatttaaggctaacagccttccttcaggatatgctctaggaaaaattgcgggtcttgggtctgttctgactcgatgggaaaagttgtacttcaacccatttcccactcaacaagaactagaggcattagcacaagtgattcaagtggaggttgagaaattaagagagatgctacccactaaaggtgtcacaatgatgcctcgacccattcgattatgtgcggcttgctatgcagagtcaccttatcaccggatcgagtggcagtttaaggacaaaatgaagtgcgatcgccatcagttgcgcttattaacaaaatgcacaaactgtcagacaccattccccattcctgctgattgggaaaaaggagaatgctcgcattgttttttgtcttttgctaagatggtgaagtgtcaaaagcgtcgttagtaacctaggctgctgccaccgctgagcaataactagcataaccccttggggcctctaaacgggtcttgaggggttttttgctgaaacctcaggcatttgagaagcacacggtcacactgcttccggtagtcaataaagcctgcagcaaagactacctacttaaatgaaccgcaaatgtacattcgcaaattaaatgtcgtaattcgcaaatttgtgtcgtttttcgcaaattaatgtcgtttagaatagtttgtctcatcaattcaattataggaacttttcgcaaattaatgtcgtcctgtttctccatttagtgtcgattaacaaattaatgtcgctgttaacgaattaatgtcgtcgaattagttccaactaacgttaacaaattaatgtcgtctaacataatgtcttgctaggatccatggagaaaaaaatcactggatataccaccgttgatatatcccaatggcatcgtaaagaacattttgaggcatttcagtcagttgctcaatgtacctataaccagaccgttcagctggatattacggcctttttaaagaccgtaaagaaaaataagcacaagttttatccggcctttattcacattcttgcccgcctgatgaatgctcatccggagttccgtatggcaatgaaagacggtgagctggtgatatgggatagtgttcacccttgttacaccgttttccatgagcaaactgaaacgttttcatcgctctggagtgaataccacgacgatttccggcagtttctacacatatattcgcaagatgtggcgtgttacggtgaaaacctggcctatttccctaaagggtttattgagaatatgtttttcgtctcagccaatccctgggtgagtttcaccagttttgatttaaacgtggccaatatggacaacttcttcgcccccgttttcactatgggcaaatattatacgcaaggcgacaaggtgctgatgccgctggcgattcaggttcatcatgccgtttgtgatggcttccatgtcggcagaatgcttaatgaattacaacagtactgcgatgagtggcagggcggggcgtaatttttttaaggcagttattggtgcccttctagaaaaaccactgattaacactttaggtactaaagtaccactaatgtggcaaaaatgcgacatctaatttgcgaaacaggcaaatcttaataaacgacatttaatttgcgaaaataggatttgcgacatctaatttgcgaaacaggcaaattactcagttttatggataaatagcttgtaagtcctacgcaataaagatctcagctattagaagtaattgcgacactaatttgcgaattgcgacatataatttgcgaatgtacaccaagctttaaaccagcaatagacataagcggctatttaacgaccctgccctgaaccgacgaccgggtcatcgtggccggatcttgcggcccctcggcttgaacgaattgttagacattatttgccgactaccttggtgatctcgcctttcacgtagtggacaaattcttccaactgatctgcgcgcgaggccaagcgatcttcttcttgtccaagataagcctgtctagcttcaagtatgacgggctgatactgggccggcaggcgctccattgcccagtcggcagcgacatccttcggcgcgattttgccggttactgcgctgtaccaaatgcgggacaacgtaagcactacatttcgctcatcgccagcccagtcgggcggcgagttccatagcgttaaggtttcatttagcgcctcaaatagatcctgttcaggaaccggatcaaagagttcctccgccgctggacctaccaaggcaacgctatgttctcttgcttttgtcagcaagatagccagatcaatgtcgatcgtggctggctcgaagatacctgcaagaatgtcattgcgctgccattctccaaattgcagttcgcgcttagctggataacgccacggaatgatgtcgtcgtgcacaacaatggtgacttctacagcgcggagaatctcgctctctccaggggaagccgaagtttccaaaaggtcgttgatcaaagctcgccgcgttgtttcatcaagccttacggtcaccgtaaccagcaaatcaatatcactgtgtggcttcaggccgccatccactgcggagccgtacaaatgtacggccagcaacgtcggttcgagatggcgctcgatgacgccaactacctctgatagttgagtcgatacttcggcgatcaccgcttccctcatactcttcctttttcaatattattgaagcatttatcagggttattgtctcatgagcggatacatatttgaatgtatttagaaaaataaacaaatagctagctcactcggtcgctacgctccgggcgtgagactgcggcgggcgctgcggacacatacaaagttacccacagattccgtggataagcaggggactaacatgtgaggcaaaacagcagggccgcgccggtggcgtttttccataggctccgccctcctgccagagttcacataaacagacgcttttccggtgcatctgtgggagccgtgaggctcaaccatgaatctgacagtacgggcgaaacccgacaggacttaaagatccccaccgtttccggcgggtcgctccctcttgcgctctcctgttccgaccctgccgtttaccggatacctgttccgcctttctcccttacgggaagtgtggcgctttctcatagctcacacactggtatctcggctcggtgtaggtcgttcgctccaagctgggctgtaagcaagaactccccgttcagcccgactgctgcgccttatccggtaactgttcacttgagtccaacccggaaaagcacggtaaaacgccactggcagcagccattggtaactgggagttcgcagaggatttgtttagctaaacacgcggttgctcttgaagtgtgcgccaaagtccggctacactggaaggacagatttggttgctgtgctctgcgaaagccagttaccacggttaagcagttccccaactgacttaaccttcgatcaaaccacctccccaggtggttttttcgtttacagggcaaaagattacgcgcagaaaaaaaggatctcaagaagatcctttgatc

SEQ ID NO: 67 - DNA, 4593 bp, artificial sequence
  Synthetic
ccgccgcagtctcacgcccggagcgtagcgaccgagtgagctagctatttgtttatttttctaaatacattcaaatatgtatccgctcatgagacaataaccctgataaatgcttcaataatattgaaaaaggaagagtatgagggaagcggtgatcgccgaagtatcgactcaactatcagaggtagttggcgtcatcgagcgccatctcgaaccgacgttgctggccgtacatttgtacggctccgcagtggatggcggcctgaagccacacagtgatattgatttgctggttacggtgaccgtaaggcttgatgaaacaacgcggcgagctttgatcaacgaccttttggaaacttcggcttcccctggagagagcgagattctccgcgctgtagaagtcaccattgttgtgcacgacgacatcattccgtggcgttatccagctaagcgcgaactgcaatttggagaatggcagcgcaatgacattcttgcaggtatcttcgagccagccacgatcgacattgatctggctatcttgctgacaaaagcaagagaacatagcgttgccttggtaggtccagcggcggaggaactctttgatccggttcctgaacaggatctatttgaggcgctaaatgaaaccttaacgctatggaactcgccgcccgactgggctggcgatgagcgaaatgtagtgcttacgttgtcccgcatttggtacagcgcagtaaccggcaaaatcgcgccgaaggatgtcgctgccgactgggcaatggagcgcctgccggcccagtatcagcccgtcatacttgaagctagacaggcttatcttggacaagaagaagatcgcttggcctcgcgcgcagatcagttggaagaatttgtccactacgtgaaaggcgagatcaccaaggtagtcggcaaataatgtctaacaattcgttcaagccgaggggccgcaagatccggccacgatgacccggtcgtcggttcagggcagggtcgttaaatagccgcttatgtctattgctggtttaccggtttattgactaccggaagcagtgtgaccgtgtgcttctcaaatgcctgaggtttcagcaaaaaacccctcaagacccgtttagaggccccaaggggttatgctagttattgctcagcggtggcagcagcctaggcatctccacaaaaggcgtagtgtacagtgacaaattatctgtcgtcggtgacagattaatgtcattgtgactatttaattgtcgtcgtgacccatcagcgttgcttaattaattgatgacaaattaaatgtcatcaatataatatgctctgcaattattatacaaagcaattaaaacaagcggataaaaggacttgctttcaacccacccctaagtttaatagttactgagactctagaagggcaccaataactgccttaaaaaaattacgccccgccctgccactcatcgcagtactgttgtaattcattaagcattctgccgacatggaagccatcacaaacggcatgatgaacctgaatcgccagcggcatcagcaccttgtcgccttgcgtataatatttgcccatagtgaaaacgggggcgaagaagttgtccatattggccacgtttaaatcaaaactggtgaaactcacccagggattggctgagacgaaaaacatattctcaataaaccctttagggaaataggccaggttttcaccgtaacacgccacatcttgcgaatatatgtgtagaaactgccggaaatcgtcgtggtattcactccagagcgatgaaaacgtttcagtttgctcatggaaaacggtgtaacaagggtgaacactatcccatatcaccagctcaccgtctttcattgccatacggaactccggatgagcattcatcaggcgggcaagaatgtgaataaaggccggataaaacttgtgcttatttttctttacggtctttaaaaaggccgtaatatccagctgaacggtctggttataggtacattgagcaactgactgaaatgcctcaaaatgttctttacgatgccattgggatatatcaacggtggtatatccagtgatttttttctccattatttacctcctgcgacagtcaatttgtcattatgaaaatacacaaaagctttttcctatcttgcaaagcgacagctaatttgtcacaatcacggacaacgacatctattttgtcactgcaaagaggttatgctaaaactgccaaagcgctataatctatactgtataaggattttactgatgacaataatttgtcacaacgacatataattagtcactgtacacgtagagacgtagcaatgctccatggtatatctccttattaaagttaaacaaaattatttctacaggggaattgttatccgctcacaattcccctatagtgagtcgtattaatttcctaatgcaggagtcgcataagggagagcgtcgagatcccggacaccatcgaatggcgcaaaacctttcgcggtatggcatgatagcgcccggaagagagtcaattcagggtggtgaatgtgaaaccagtaacgttatacgatgtcgcagagtatgccggtgtctcttatcagaccgtttcccgcgtggtgaaccaggccagccacgtttctgcgaaaacgcgggaaaaagtggaagcggcgatggcggagctgaattacattcccaaccgcgtggcacaacaactggcgggcaaacagtcgttgctgattggcgttgccacctccagtctggccctgcacgcgccgtcgcaaattgtcgcggcgattaaatctcgcgccgatcaactgggtgccagcgtggtggtgtcgatggtagaacgaagcggcgtcgaagcctgtaaagcggcggtgcacaatcttctcgcgcaacgcgtcagtgggctgatcattaactatccgctggatgaccaggatgccattgctgtggaagctgcctgcactaatgttccggcgttatttcttgatgtctctgaccagacacccatcaacagtattattttctcccatgaagacggtacgcgactgggcgtggagcatctggtcgcattgggtcaccagcaaatcgcgctgttagcgggcccattaagttctgtctcggcgcgtctgcgtctggctggctggcataaatatctcactcgcaatcaaattcagccgatagcggaacgggaaggcgactggagtgccatgtccggttttcaacaaaccatgcaaatgctgaatgagggcatcgttcccactgcgatgctggttgccaacgatcagatggcgctgggcgcaatgcgcgccattaccgagtccgggctgcgcgttggtgcggacatctcggtagtgggatacgacgataccgaagacagctcatgttatatcccgccgttaaccaccatcaaacaggattttcgcctgctggggcaaaccagcgtggaccgcttgctgcaactctctcagggccaggcggtgaagggcaatcagctgttgcccgtctcactggtgaaaagaaaaaccaccctggcgcccaatacgcaaaccgcctctccccgcgcgttggccgattcattaatgcagctggcacgacaggtttcccgactggaaagcgggcagtgagcgcaacgcaattaatgtaagttagctcactcattaggcaccgggatctcgaccgatgcccttgagagccttcaacccagtcagctccttccggtgggcgcggggcatgactaacatgagaattacaacttatatcgtatggggctgacttcaggtgctacatttgaagagataaattgcactgaaatctagagcggttcagtagaaaagatcaaaggatcttcttgagatcctttttttctgcgcgtaatcttttgccctgtaaacgaaaaaaccacctggggaggtggtttgatcgaaggttaagtcagttggggaactgcttaaccgtggtaactggctttcgcagagcacagcaaccaaatctgtccttccagtgtagccggactttggcgcacacttcaagagcaaccgcgtgtttagctaaacaaatcctctgcgaactcccagttaccaatggctgctgccagtggcgttttaccgtgcttttccgggttggactcaagtgaacagttaccggataaggcgcagcagtcgggctgaacggggagttcttgcttacagcccagcttggagcgaacgacctacaccgagccgagataccagtgtgtgagctatgagaaagcgccacacttcccgtaagggagaaaggcggaacaggtatccggtaaacggcagggtcggaacaggagagcgcaagagggagcgacccgccggaaacggtggggatctttaagtcctgtcgggtttcgcccgtactgtcagattcatggttgagcctcacggctcccacagatgcaccggaaaagcgtctgtttatgtgaactctggcaggagggcggagcctatggaaaaacgccaccggcgcggccctgctgttttgcctcacatgttagtcccctgcttatccacggaatctgtgggtaactttgtatgtgtccgcagcgc

SEQ ID NO: 68 - DNA, 8115 bp, artificial sequence
  Synthetic
gacgaaagggcctcgtgatacgcctatttttataggttaatgtcatgataataatggtttcttagacgtcaggtggcacttttcggggaaatgtgcgcggaacccctatttgtttatttttctaaatacattcaaatatgtatccgctcatgagacaataaccctgataaatgcttcaataatattgaaaaaggaagagtatgagtattcaacatttccgtgtcgcccttattcccttttttgcggcattttgccttcctgtttttgctcacccagaaacgctggtgaaagtaaaagatgctgaagatcagttgggtgcacgagtgggttacatcgaactggatctcaacagcggtaagatccttgagagttttcgccccgaagaacgttttccaatgatgagcacttttaaagttctgctatgtggcgcggtattatcccgtattgacgccgggcaagagcaactcggtcgccgcatacactattctcagaatgacttggttgagtactcaccagtcacagaaaagcatcttacggatggcatgacagtaagagaattatgcagtgctgccataaccatgagtgataacactgcggccaacttacttctgacaacgatcggaggaccgaaggagctaaccgcttttttgcacaacatgggggatcatgtaactcgccttgatcgttgggaaccggagctgaatgaagccataccaaacgacgagcgtgacaccacgatgcctgtagcaatggcaacaacgttgcgcaaactattaactggcgaactacttactctagcttcccggcaacaattaatagactggatggaggcggataaagttgcaggaccacttctgcgctcggcccttccggctggctggtttattgctgataaatctggagccggtgagcgtgggtctcgcggtatcattgcagcactggggccagatggtaagccctcccgtatcgtagttatctacacgacggggagtcaggcaactatggatgaacgaaatagacagatcgctgagataggtgcctcactgattaagcattggtaactgtcagaccaagtttactcatatatactttagattgatttaaaacttcatttttaatttaaaaggatctaggtgaagatcctttttgataatctcatgaccaaaatcccttaacgtgagttttcgttccactgagcgtcagaccccgtagaaaagatcaaaggatcttcttgagatcctttttttctgcgcgtaatctgctgcttgcaaacaaaaaaaccaccgctaccagcggtggtttgtttgccggatcaagagctaccaactctttttccgaaggtaactggcttcagcagagcgcagataccaaatactgttcttctagtgtagccgtagttaggccaccacttcaagaactctgtagcaccgcctacatacctcgctctgctaatcctgttaccagtggctgctgccagtggcgataagtcgtgtcttaccgggttggactcaagacgatagttaccggataaggcgcagcggtcgggctgaacggggggttcgtgcacacagcccagcttggagcgaacgacctacaccgaactgagatacctacagcgtgagctatgagaaagcgccacgcttcccgaagggagaaaggcggacaggtatccggtaagcggcagggtcggaacaggagagcgcacgagggagcttccagggggaaacgcctggtatctttatagtcctgtcgggtttcgccacctctgacttgagcgtcgatttttgtgatgctcgtcaggggggcggagcctatggaaaaacgccagcaacgcggcctttttacggttcctggccttttgctggccttttgctcacatgttctttcctgcgttatcccctgattctgtggataaccgtattaccgcctttgagtgagctgataccgctcgccgcagccgaacgaccgagcgcagcgagtcagtgagcgaggaagcggaagagcgcccaatacgcaaaccgcctctccccgcgcgttggccgattcattaatgcagctggcacgacaggtttcccgactggaaagcgggcagtgagcgcaacgcaattaatgtgagttagctcactcattaggcaccccaggctttacactttatgcttccggctcgtatgttgtgtggaattgtgagcggataacaatttcacacaggaaacagctatgaccatgattacgccaagctttataagaaggagatatacatatgaacagtcagcaaaatcctgatttagctgttcatcccttggcaattcctatggaaggcttactaggagaaagtgctacaactcttgagaagaatgtaattgccacacaactctcagaggaagcccaagtaaagctagaggtaatccaaagtttactggaaccctgcgatcgcacaacttatgggcaaaagttgcgggaagcagcagagaaactaaatgtatcgttgcgaacggtacaaaggttggtgaaaaactgggaacaagatggcttagtcggcctcactcaaacaagtagggctgataaaggaaaacaccgcattggtgagttttgggaaaacttcattaccaaaacctacaaggagggtaacaagggaagtaaacgtatgacccctaaacaagttgctctcagagtcgaggctaaagcccgtgaattaaaagactctaagccgcccaattacaaaaccgtgttacgggtattagcacccattttggaaaagcaacaaaaagccaagagtatccgcagtcctggctggagaggaactacgctttcggttaaaacccgtgaaggaaaagatttatcggttgattacagtaaccatgtttggcaatgtgaccatacccgcgtggatgtgttgctggtagatcaacatggtgaaattttaagtcgtccctggctaacaacagtaattgatacttactctcgttgcattatgggtatcaacttgggctttgatgcacccagttctggggtagtagcattagcgttacgccatgcaattctaccaaagcgttacggttccgagtacaaactgcattgtgagtggggaacctatggaaaaccagaacatttttatactgatggcggtaaagactttcgctctaaccacttgagtcagattggggcgcagttgggatttgtctgtcatttacgcgatcgcccttctgaaggtggagtagtagaacgtcccttcaaaacattaaatgaccaactattttcaacgcttcctgggtacaccggatctaatgtgcaggaacgcccagaagatgcagagaaggacgcaagacttactttgcgagaactagaacagttacttgtgcgttacatcgtagatcgttacaaccaaagtattgatgcgcggatgggcgaccaaacgcgctttgagcgttgggaagcaggattgcctacagtgccagtaccaataccagaacgagatttggatatttgtttaatgaagcagtcacggcgcactgtgcaaagaggtggttgtttgcagtttcagaatttaatgtatcggggggagtatttggcaggttatgccggagaaactgtcaacttgaggtttgaccccagagacattacaacaattttggtttatcgccaggaaaacaatcaggaagtatttctgactcgcgctcacgctcaaggtttggagacagagcaactggcattagatgaggctgaggcagcaagtcgcagactccgtaccgcagggaaaactatcagtaaccaatcattattgcaagaagttgttgaccgcgatgctcttgtcgctaccaagaaaagccgtaaggagcgtcaaaaattggaacagactgttttgcgatctgctgctgttgatgaaagtaatagagaatccttgccttctcaaatagttgaaccagatgaagtggaatctacagaaacggttcactctcaatacgaggacattgaggtgtgggactatgaacaacttcgtgaagaatatgggttttaaacaatgacagaagctcaggcgatcgccaagcagttgggtggggtaaaaccggatgatgagtggttacaagctgaaattgctcgtctcaagggtaagagcattgtgcctttacagcaggtaaaaactctccatgattggttagatggcaagcgcaaggcaagaaaatcttgccgagtagttggggaatcgagaactggcaagacagttgcttgtgatgcctacagatacaggcacaaacctcagcaggaagctggacgaccgccaactgtgcctgtcgtttatattcgacctcaccaaaaatgtggccccaaggatttgtttaaaaagattactgagtacctcaagtatcgggtaacaaaagggactgtatctgattttcgagataggacgatagaagtactcaagggttgtggcgtagagatgctaattattgatgaagctgaccgtctcaagcctgaaacttttgctgatgtgcgagatattgccgaagatttaggaattgctgtggtactggtaggaacagaccgtttggatgcggtaattaagcgggatgagcaggttctcgaacgctttcgggcgcatcttcgctttggtaaattgtcgggagaggattttaagaacaccgtagaaatgtgggaacaaatggttttgaaactgccagtatcttctaatctaaagagcaaggagatgctacggattctcacgtcagcaactgaaggctacattggtcgccttgatgagattcttagggaagctgcaattcgttccttatcaagaggattgaagaagattgacaaggctgttttacaggaagtagctaaggagtacaaatgatagaagcaccagatgttaaaccttggctattcttgattaaaccctatgaaggggaaagcctgagccactttcttggcaggttcagacgtgccaaccatttatccgcaagtggattgggtactttggcaggaattggtgctatagtggcacgttgggaaagatttcattttaatcctcgccctagtcagcaagaattggaagcgatcgcatctgtagtagaagtggatgctcaaaggttagcccagatgttaccgcctgctggagtgggaatgcagcatgagccaattcgcttgtgtggggcttgttatgccgagtcgccttgtcaccgaattgaatggcagtacaagtcggtgtggaagtgcgatcgccatcaactcaagattttagcaaagtgtccaaactgtcaagcaccttttaaaatgcctgcgctgtgggaggatgggtgctgtcacagatgtaggatgccgtttgcagaaatggcaaagctacagaaggtttgatgataaaaccagaaaaaggtcttaaataaggagatataccatgagtcaaataactattcaagctcgacttatttcctttgaatcaaaccgccaacaactctggaagttgatggcagatttaaacacgccgttaattaacgaactgctttgccagttaggtcaacaccccgacttcgagaagtggcaacaaaagggtaaactcccgtctaccgttgtgagccagttatgtcaacctctcaaaactgaccctcgctttgcaggtcagcccagccgtttatatatgtcggcaattcatattgtggactacatctacaagtcctggctggctatacagaaacggcttcaacagcagctagatggaaagacgcgctggctagaaatgctcaatagcgatgctgaattagtagaacttagtggtgacactttagaggctattcgtgtcaaagctgctgaaattttggcaatagctatgccagcatctgagtcagatagcgcttcacctaaagggaaaaaaggtaaaaaggagaaaaaaccctcatcttctagccctaagcgtagtttatccaagacattatttgacgcttaccaagaaacggaagatattaagagccgtagcgccatcagctacctgttaaaaaatggctgcaaacttactgacaaagaagaagattcagaaaaatttgctaaacgtcgtcgtcaagttgaaatccaaattcaaaggcttaccgaaaagttaataagtcgcatgcctaaaggtcgagatttgaccaatgctaaatggttagagacactcttgactgctacaaccactgttgctgaagataacgcccaagccaaacgctggcaggatattctgttgactcgatcaagttctctcccattcccccttgtttttgaaaccaacgaggatatggtttggtcaaagaatcaaaagggtaggctgtgtgttcacttcaatggcttgagcgatttaatttttgaggtgtactgcggcaatcgtcaacttcactggtttcaacgcttcctagaagatcaacagactaaacgcaaaagcaaaaatcagcattctagcggcttgttcacactcagaaatggtcatctagtttggcttgaaggtgagggtaaaggggaaccttggaatcttcaccacttgaccctttactgctgtgttgacaatcgcttgtggacagaggagggaacagaaatcgttcgccaagagaaagcagatgaaattactaaattcatcacaaacatgaagaagaaaagcgatctaagcgatacacagcaggctttgattcaacgtaaacaatcaacacttactcgaataaacaattcctttgagcgtcctagccaacccctttatcaaggtcaatcacacattttggttggcgtaagcctgggactagaaaaacctgccacagtagcagtagtagatgcgatcgccaacaaagtcttggcttaccggagtattaaacaattacttggcgacaattacgaactgctaaatcgccagagacgacaacagcagtacctatctcacgaacgccacaaagcacaaaaaaacttctctcccaatcaatttggagcatctgagttagggcaacatatagacagattattagctaaagccattgtagcgttagcgagaacctacaaagctggcagtattgtcttgcccaagttaggggatatgcgggaggttgtccaaagtgaaattcaagctatagcagaacaaaaatttcccggttatattgaaggtcagcaaaaatatgccaaacagtaccgggttaatgttcatcggtggagctacggcagattaattcaaagcattcaaagtaaagcagctcaaacaggaattgtgattgaggagggaaaacaacctattcgaggtagtccccacgacaaagcaaaggaattagcactttctgcttacaatctccgcctaactaggcgaagctaacaaatatctgaaccttgataatagaacattaatagcgccgcaattcatgcttgacagctagctcagtcctaggtataatactagtatattaatagcgccgcaattcatgctgcttgcagcctctgaattttgttaaatgagggttagtttgactgtataaatacagtcttgctttctgaccctggtagctgctcaccctgatgctgctgtcaatagacaggataggtgcgctcccagcaataagggcgcggatgtactgctgtagtggctactgaatcacccccgatcaagggggaaccctccaaaaggtgggttgaaagatgccgatcgcgtcacactacgtgtgaatttttttgttcagaacgctcggtcttgcacaccgggcgttttttctttgtgagtccagaattcactggccgtcgttttacaacgtcgtgactgggaaaaccctggcgttacccaacttaatcgccttgcagcacatccccctttcgccagctggcgtaatagcgaagaggcccgcaccgatcgcccttcccaacagttgcgcagcctgaatggcgaatggcgcctgatgcggtattttctccttacgcatctgtgcggtatttcacaccgcatatggtgcactctcagtacaatctgctctgatgccgcatagttaagccagccccgacacccgccaacacccgctgacgcgccctgacgggcttgtctgctcccggcatccgcttacagacaagctgtgaccgtctccgggagctgcatgtgtcagaggttttcaccgtcatcaccgaaacgcgcga

SEQ ID NO: 69 - DNA, 8115 bp, artificial sequence
  Synthetic
gacgaaagggcctcgtgatacgcctatttttataggttaatgtcatgataataatggtttcttagacgtcaggtggcacttttcggggaaatgtgcgcggaacccctatttgtttatttttctaaatacattcaaatatgtatccgctcatgagacaataaccctgataaatgcttcaataatattgaaaaaggaagagtatgagtattcaacatttccgtgtcgcccttattcccttttttgcggcattttgccttcctgtttttgctcacccagaaacgctggtgaaagtaaaagatgctgaagatcagttgggtgcacgagtgggttacatcgaactggatctcaacagcggtaagatccttgagagttttcgccccgaagaacgttttccaatgatgagcacttttaaagttctgctatgtggcgcggtattatcccgtattgacgccgggcaagagcaactcggtcgccgcatacactattctcagaatgacttggttgagtactcaccagtcacagaaaagcatcttacggatggcatgacagtaagagaattatgcagtgctgccataaccatgagtgataacactgcggccaacttacttctgacaacgatcggaggaccgaaggagctaaccgcttttttgcacaacatgggggatcatgtaactcgccttgatcgttgggaaccggagctgaatgaagccataccaaacgacgagcgtgacaccacgatgcctgtagcaatggcaacaacgttgcgcaaactattaactggcgaactacttactctagcttcccggcaacaattaatagactggatggaggcggataaagttgcaggaccacttctgcgctcggcccttccggctggctggtttattgctgataaatctggagccggtgagcgtgggtctcgcggtatcattgcagcactggggccagatggtaagccctcccgtatcgtagttatctacacgacggggagtcaggcaactatggatgaacgaaatagacagatcgctgagataggtgcctcactgattaagcattggtaactgtcagaccaagtttactcatatatactttagattgatttaaaacttcatttttaatttaaaaggatctaggtgaagatcctttttgataatctcatgaccaaaatcccttaacgtgagttttcgttccactgagcgtcagaccccgtagaaaagatcaaaggatcttcttgagatcctttttttctgcgcgtaatctgctgcttgcaaacaaaaaaaccaccgctaccagcggtggtttgtttgccggatcaagagctaccaactctttttccgaaggtaactggcttcagcagagcgcagataccaaatactgttcttctagtgtagccgtagttaggccaccacttcaagaactctgtagcaccgcctacatacctcgctctgctaatcctgttaccagtggctgctgccagtggcgataagtcgtgtcttaccgggttggactcaagacgatagttaccggataaggcgcagcggtcgggctgaacggggggttcgtgcacacagcccagcttggagcgaacgacctacaccgaactgagatacctacagcgtgagctatgagaaagcgccacgcttcccgaagggagaaaggcggacaggtatccggtaagcggcagggtcggaacaggagagcgcacgagggagcttccagggggaaacgcctggtatctttatagtcctgtcgggtttcgccacctctgacttgagcgtcgatttttgtgatgctcgtcaggggggcggagcctatggaaaaacgccagcaacgcggcctttttacggttcctggccttttgctggccttttgctcacatgttctttcctgcgttatcccctgattctgtggataaccgtattaccgcctttgagtgagctgataccgctcgccgcagccgaacgaccgagcgcagcgagtcagtgagcgaggaagcggaagagcgcccaatacgcaaaccgcctctccccgcgcgttggccgattcattaatgcagctggcacgacaggtttcccgactggaaagcgggcagtgagcgcaacgcaattaatgtgagttagctcactcattaggcaccccaggctttacactttatgcttccggctcgtatgttgtgtggaattgtgagcggataacaatttcacacaggaaacagctatgaccatgattacgccaagctttataagaaggagatatacatatgaacagtcagcaaaatcctgatttagctgttcatcccttggcaattcctatggaaggcttactaggagaaagtgctacaactcttgagaagaatgtaattgccacacaactctcagaggaagcccaagtaaagctagaggtaatccaaagtttactggaaccctgcgatcgcacaacttatgggcaaaagttgcgggaagcagcagagaaactaaatgtatcgttgcgaacggtacaaaggttggtgaaaaactgggaacaagatggcttagtcggcctcactcaaacaagtagggctgataaaggaaaacaccgcattggtgagttttgggaaaacttcattaccaaaacctacaaggagggtaacaagggaagtaaacgtatgacccctaaacaagttgctctcagagtcgaggctaaagcccgtgaattaaaagactctaagccgcccaattacaaaaccgtgttacgggtattagcacccattttggaaaagcaacaaaaagccaagagtatccgcagtcctggctggagaggaactacgctttcggttaaaacccgtgaaggaaaagatttatcggttgattacagtaaccatgtttggcaatgtgaccatacccgcgtggatgtgttgctggtagatcaacatggtgaaattttaagtcgtccctggctaacaacagtaattgatacttactctcgttgcattatgggtatcaacttgggctttgatgcacccagttctggggtagtagcattagcgttacgccatgcaattctaccaaagcgttacggttccgagtacaaactgcattgtgagtggggaacctatggaaaaccagaacatttttatactgatggcggtaaagactttcgctctaaccacttgagtcagattggggcgcagttgggatttgtctgtcatttacgcgatcgcccttctgaaggtggagtagtagaacgtcccttcaaaacattaaatgaccaactattttcaacgcttcctgggtacaccggatctaatgtgcaggaacgcccagaagatgcagagaaggacgcaagacttactttgcgagaactagaacagttacttgtgcgttacatcgtagatcgttacaaccaaagtattgatgcgcggatgggcgaccaaacgcgctttgagcgttgggaagcaggattgcctacagtgccagtaccaataccagaacgagatttggatatttgtttaatgaagcagtcacggcgcactgtgcaaagaggtggttgtttgcagtttcagaatttaatgtatcggggggagtatttggcaggttatgccggagaaactgtcaacttgaggtttgaccccagagacattacaacaattttggtttatcgccaggaaaacaatcaggaagtatttctgactcgcgctcacgctcaaggtttggagacagagcaactggcattagatgaggctgaggcagcaagtcgcagactccgtaccgcagggaaaactatcagtaaccaatcattattgcaagaagttgttgaccgcgatgctcttgtcgctaccaagaaaagccgtaaggagcgtcaaaaattggaacagactgttttgcgatctgctgctgttgatgaaagtaatagagaatccttgccttctcaaatagttgaaccagatgaagtggaatctacagaaacggttcactctcaatacgaggacattgaggtgtgggactatgaacaacttcgtgaagaatatgggttttaaacaatgacagaagctcaggcgatcgccaagcagttgggtggggtaaaaccggatgatgagtggttacaagctgaaattgctcgtctcaagggtaagagcattgtgcctttacagcaggtaaaaactctccatgattggttagatggcaagcgcaaggcaagaaaatcttgccgagtagttggggaatcgagaactggcaagacagttgcttgtgatgcctacagatacaggcacaaacctcagcaggaagctggacgaccgccaactgtgcctgtcgtttatattcgacctcaccaaaaatgtggccccaaggatttgtttaaaaagattactgagtacctcaagtatcgggtaacaaaagggactgtatctgattttcgagataggacgatagaagtactcaagggttgtggcgtagagatgctaattattgatgaagctgaccgtctcaagcctgaaacttttgctgatgtgcgagatattgccgaagatttaggaattgctgtggtactggtaggaacagaccgtttggatgcggtaattaagcgggatgagcaggttctcgaacgctttcgggcgcatcttcgctttggtaaattgtcgggagaggattttaagaacaccgtagaaatgtgggaacaaatggttttgaaactgccagtatcttctaatctaaagagcaaggagatgctacggattctcacgtcagcaactgaaggctacattggtcgccttgatgagattcttagggaagctgcaattcgttccttatcaagaggattgaagaagattgacaaggctgttttacaggaagtagctaaggagtacaaatgatagaagcaccagatgttaaaccttggctattcttgattaaaccctatgaaggggaaagcctgagccactttcttggcaggttcagacgtgccaaccatttatccgcaagtggattgggtactttggcaggaattggtgctatagtggcacgttgggaaagatttcattttaatcctcgccctagtcagcaagaattggaagcgatcgcatctgtagtagaagtggatgctcaaaggttagcccagatgttaccgcctgctggagtgggaatgcagcatgagccaattcgcttgtgtggggcttgttatgccgagtcgccttgtcaccgaattgaatggcagtacaagtcggtgtggaagtgcgatcgccatcaactcaagattttagcaaagtgtccaaactgtcaagcaccttttaaaatgcctgcgctgtgggaggatgggtgctgtcacagatgtaggatgccgtttgcagaaatggcaaagctacagaaggtttgatgataaaaccagaaaaaggtcttaaataaggagatataccatgagtcaaataactattcaagctcgacttatttcctttgaatcaaaccgccaacaactctggaagttgatggcagatttaaacacgccgttaattaacgaactgctttgccagttaggtcaacaccccgacttcgagaagtggcaacaaaagggtaaactcccgtctaccgttgtgagccagttatgtcaacctctcaaaactgaccctcgctttgcaggtcagcccagccgtttatatatgtcggcaattcatattgtggactacatctacaagtcctggctggctatacagaaacggcttcaacagcagctagatggaaagacgcgctggctagaaatgctcaatagcgatgctgaattagtagaacttagtggtgacactttagaggctattcgtgtcaaagctgctgaaattttggcaatagctatgccagcatctgagtcagatagcgcttcacctaaagggaaaaaaggtaaaaaggagaaaaaaccctcatcttctagccctaagcgtagtttatccaagacattatttgacgcttaccaagaaacggaagatattaagagccgtagcgccatcagctacctgttaaaaaatggctgcaaacttactgacaaagaagaagattcagaaaaatttgctaaacgtcgtcgtcaagttgaaatccaaattcaaaggcttaccgaaaagttaataagtcgcatgcctaaaggtcgagatttgaccaatgctaaatggttagagacactcttgactgctacaaccactgttgctgaagataacgcccaagccaaacgctggcaggatattctgttgactcgatcaagttctctcccattcccccttgtttttgaaaccaacgaggatatggtttggtcaaagaatcaaaagggtaggctgtgtgttcacttcaatggcttgagcgatttaatttttgaggtgtactgcggcaatcgtcaacttcactggtttcaacgcttcctagaagatcaacagactaaacgcaaaagcaaaaatcagcattctagcggcttgttcacactcagaaatggtcatctagtttggcttgaaggtgagggtaaaggggaaccttggaatcttcaccacttgaccctttactgctgtgttgacaatcgcttgtggacagaggagggaacagaaatcgttcgccaagagaaagcagatgaaattactaaattcatcacaaacatgaagaagaaaagcgatctaagcgatacacagcaggctttgattcaacgtaaacaatcaacacttactcgaataaacaattcctttgagcgtcctagccaacccctttatcaaggtcaatcacacattttggttggcgtaagcctgggactagaaaaacctgccacagtagcagtagtagatgcgatcgccaacaaagtcttggcttaccggagtattaaacaattacttggcgacaattacgaactgctaaatcgccagagacgacaacagcagtacctatctcacgaacgccacaaagcacaaaaaaacttctctcccaatcaatttggagcatctgagttagggcaacatatagacagattattagctaaagccattgtagcgttagcgagaacctacaaagctggcagtattgtcttgcccaagttaggggatatgcgggaggttgtccaaagtgaaattcaagctatagcagaacaaaaatttcccggttatattgaaggtcagcaaaaatatgccaaacagtaccgggttaatgttcatcggtggagctacggcagattaattcaaagcattcaaagtaaagcagctcaaacaggaattgtgattgaggagggaaaacaacctattcgaggtagtccccacgacaaagcaaaggaattagcactttctgcttacaatctccgcctaactaggcgaagctaacaaatatctgaaccttgataatagaacattaatagcgccgcaattcatgcttgacagctagctcagtcctaggtataatactagtatattaatagcgccgcaattcatgctgcttgcagcctctgaattttgttaaatgagggttagtttgactgtataaatacagtcttgctttctgaccctggtagctgctcaccctgatgctgctgtcaatagacaggataggtgcgctcccagcaataagggcgcggatgtactgctgtagtggctactgaatcacccccgatcaagggggaaccctccaaaaggtgggttgaaaggccactcgctttaatgatgatttgtgaatttttttgttcagaacgctcggtcttgcacaccgggcgttttttctttgtgagtccagaattcactggccgtcgttttacaacgtcgtgactgggaaaaccctggcgttacccaacttaatcgccttgcagcacatccccctttcgccagctggcgtaatagcgaagaggcccgcaccgatcgcccttcccaacagttgcgcagcctgaatggcgaatggcgcctgatgcggtattttctccttacgcatctgtgcggtatttcacaccgcatatggtgcactctcagtacaatctgctctgatgccgcatagttaagccagccccgacacccgccaacacccgctgacgcgccctgacgggcttgtctgctcccggcatccgcttacagacaagctgtgaccgtctccgggagctgcatgtgtcagaggttttcaccgtcatcaccgaaacgcgcga

SEQ ID NO: 70 - DNA, 12724 bp, artificial sequence
  Synthetic
tcaagactaacaaacaaaagtagaacaactgttcaccgttacatatcaaagggaaaactgtccatacccatggattcttcgtctgtttctactggtattggcacaaacctgatatcgatgcaggtggcacttttcggggaaatgtgcgcggaacccctatttgtttatttttctaaatacattcaaatatgtatccgctcatgagacaataaccctggtagcgaccgagtgagctagctatttgtttatttttctaaatacattcaaatatgtatccgctcatgagacaataaccctgataaatgcttcaataatattgaaaaaggaagagtatgagggaagcggtgatcgccgaagtatcgactcaactatcagaggtagttggcgtcatcgagcgccatctcgaaccgacgttgctggccgtacatttgtacggctccgcagtggatggcggcctgaagccacacagtgatattgatttgctggttacggtgaccgtaaggcttgatgaaacaacgcggcgagctttgatcaacgaccttttggaaacttcggcttcccctggagagagcgagattctccgcgctgtagaagtcaccattgttgtgcacgacgacatcattccgtggcgttatccagctaagcgcgaactgcaatttggagaatggcagcgcaatgacattcttgcaggtatcttcgagccagccacgatcgacattgatctggctatcttgctgacaaaagcaagagaacatagcgttgccttggtaggtccagcggcggaggaactctttgatccggttcctgaacaggatctatttgaggcgctaaatgaaaccttaacgctatggaactcgccgcccgactgggctggcgatgagcgaaatgtagtgcttacgttgtcccgcatttggtacagcgcagtaaccggcaaaatcgcgccgaaggatgtcgctgccgactgggcaatggagcgcctgccggcccagtatcagcccgtcatacttgaagctagacaggcttatcttggacaagaagaagatcgcttggcctcgcgcgcagatcagttggaagaatttgtccactacgtgaaaggcgagatcaccaaggtagtcggcaaataatgtcctgtcagcagaccaagtttactcatatatactttagattgatttaaaacttcatttttaatttaaaaggatctaggtgaagatccgcctgcatggataaccgtattaccgcctttgagtgagctgataccgctcgccgcagccgaacgaccgagcgcagcgagtcagtgagcgaggaagctttgacagctagctcagtcctaggtataatactagcgtcgacgtggagatataccatgggtgaactgccgagtaggtagctgataacgagacctctgtcttgtcagctagggtggtctcgtgaactgccgagtaggtagctgataacggatccgaattcgagcgaaggagatatacatatgtttttgcaaagacctaaaccttacagcgatgaaagtttagaaagtttctttatccgagtggctaacaaaaatggctacggtgatgtccatcgcttcctagaagccactaaacgattccttcaagacattgaccataatggctatcaaacctttccgactgatataactcggataaacccatactcagctaaaaacagttccagcgcacgaactgcgtcattcctgaaacttgcacaattgacatttaatgaaccgccagagctacttgggttggcaattaacagaacaaacatgaaatactcgccgtcaactagcgcggttgttagaggtgcagaagtctttcctcgcagtttactacggacgcactccatcccctgctgtcctttgtgtctgcgagaaaatggctacgcctcctacctttggcactttcaggggtacgaatactgccacagccataacgtacctttaattaccacttgtagctgtggtaaggagtttgactaccgagtatctgggttaaagggcatttgctgcaaatgcaaggagcctatcaccttaaccagcagggagaacggtcatgaggcagcgtgtactgtttcaaactggcttgctggccatgaatctaaacctctgccaaatcttcctaaaagctaccgatggggtttagttcattggtggatgggtattaaagatagcgagttcgatcacttttcgttcgttcaatttttctcaaactggccaaggtcattccactcgataatcgaagatgaagtagagttcaaccttgagcatgctgttgtcagcacgtctgaattacgactaaaagatcttcttggtcgattgtttttcggttcaattcggttacctgagcggaatcttcaacacaatatcatccttggtgagcttctctgctatttagaaaatcgtttatggcaagacaagggattaatcgccaacctcaaaatgaacgcgttagaggcgactgtaatgttaaattgtagcctcgatcagattgcatcaatggttgaacaacgcatcttgaagccaaatcgaaaaagcaagcccaacagccctcttgatgttaccgattatctatttcatttcggcgatattttctgtctttggttagctgagttccaaagcgatgagtttaaccgttcgttttatgtgtcgaggtggtaaatgcaaactctgaaagaactaatcgcatccaatcctgacgacttaacaactgaacttaagagagcatttcgtccactcacaccgcatattgcaattgatggtaatgaacttgacgcactgacgatattagtcaatttaaccgataagactgatgatcagaaagacctgctcgatcgagccaaatgcaagcaaaaacttcgagatgaaaaatggtgggctagctgcataaattgcgttaattacagacaaagccataacccaaaattcccggatatacgttctgaaggcgtgattcgaacccaagccctgggtgaattaccgagtttcctactctcgtcctcaaaaatcccaccataccattggtcatatagccatgattcaaaatacgtcaacaaaagcgcattcctcaccaatgagttttgttgggatggtgagatctcatgtttgggtgagcttcttaaagatgcagatcacccactttggaatactttgaaaaagttaggttgttctcaaaaaacttgcaaagcaatggcaaaacaactagctgatattactctcacgactatcaatgtcacactcgcaccaaattacctgactcaaatatctctccccgatagtgatacatcctacatttcactctctcctgttgcatcgctatcgatgcaaagccactttcatcagaggctccaagatgaaaatcggcatagcgcgataacgcggtttagccgaactaccaacatgggggtcactgcgatgacatgtggcggcgcatttagaatgttaaagtctggcgctaagttttccagcccccctcatcaccgattaaacagtaaacgaagttggttgacgtcagagcatgttcagtcattaaaacagtaccagcgcctcaacaaaagcctcatacctgaaaactctcggattgcactccgtagaaaatacaaaatcgagcttcaaaatatggtcagatcttggtttgcaatgcaagaccatacccttgattcgaacatacttatccaacatttgaatcatgacctatcttacttaggagccacaaaacgttttgcatacgatccagcgatgaccaagctctttactgagcttttgaaacgagagttatcaaattcaatcaataatggtgagcaacacactaatggatcgtttttagtcctaccgaatatcagggtttgtggcgcaacagctttaagctccccggtaacggtggggattccatcacttacagctttctttggcttcgttcacgcatttgaacggaatataaatcgcaccacctcatcgtttcgtgttgaatcctttgcgatatgcgtccatcaactacatgtcgagaagcgaggtttgacagcagagtttgtggaaaaaggcgacgggactatatccgctcccgcgacccgggatgactggcagtgtgatgtcgtatttagccttattttgaacaccaactttgctcaacatattgaccaagatacgttagttacatcactaccaaagcgattggctcggggttcagcaaaaattgcgattgatgactttaaacatatcaactcattctcgacattagaaacagcgatcgaatctctgccaatagaagctggtaggtggttatcactttacgcacagtcaaacaataatctaagtgatctattagcagccatgacagaggaccatcagctcatggcaagctgcgtcggttaccacttgttagaagagcccaaagataaaccaaactccctcagaggttacaaacacgctatcgccgagtgcatcattggactcattaactcaatcacctttagctcagagactgatcccaacacaatcttttggtcgctaaagaactatcaaaactacctagtggtacagccaaggagtatcaacgatgaaactaccgacaaatctagcctatgagcgctctatcgacccatcagatgtctgtttttttgtcgtctggcccgatgatagaaaaacacctttaacctacaattctcgtactctgctcgggcaaatggaagcggcatcattagcctatgatgtctcaggtcaaccaataaaaagtgccaccgctgaggcgttagctcaagggaaccctcatcaagttgatttctgccacgttccatacggtgcgagtcatattgaatgcagtttctccgtctcgttttcttctgaactacgtcaaccatataagtgtaactcaagcaaagttaaacaaacgctagtgcaattagtcgagctctacgaaacgaaaatcggctggactgagctagcaacccgatatttgatgaacatttgcaacggtaaatggctgtggaaaaatacccgtaaagcctattgctggaacattgtacttacaccttggccttggaacggggaaaaggttggatttgaagatattcgtactaactacacctcacggcaagactttaaaaataataaaaattggtctgctatagttgaaatgatcaaaaccgcattttctagtactgatgggctggcgatatttgaagtcagggccaccttgcacttgccaacgaatgctatggtgcggccaagccaagttttcacagaaaaagaaagtggcagtaaaagtaaatctaaaactcaaaacagtcgagtttttcagagtacaactattgatggtgaacgatcgccaatactaggggcctttaaaacgggagcagctattgcaaccattgacgactggtatcctgaagccactgagccactaagggtcggacggtttggggttcatcgcgaagatgtcacttgctaccgtcatccgtctaccggaaaagattttttctcgatattacaacaagcagagcactatattgaagtgttgagcgccaacaaaactcccgctcaagaaactatcaacgacatgcactttttaatggctaacctgattaagggtgggatgttccagcataaaggagactgactgtgaaatggtattataagacaatcacctttctgccagagttgtgcaacaacgagtcactggctgcaaagtgtctccgcgttctgcatggatttaactatcagtatgagacacgaaatatcggcgtttcatttccgctttggtgtgatgcaacggttggaaaaaagatttcatttgtcagcaagaacaagatagaactcgacttactacttaaacaacactatttcgtccaaatggaacaacttcaatactttcatatatccaacactgttctcgtcccagaagattgtacatacgtttcctttagacgctgtcaatctatagataagctcacagcagcagggctggcaaggaaaatcagacgcctggagaaacgtgctctatctagaggcgagcaatttgacccatcatcttttgctcaaaaagagcatactgcaatagcgcactaccactcacttggggagtccagcaaacagacgaaccgcaactttcgactcaatatcaggatgctctcggagcaaccccgtgaggggaactcgatttttagtagctatggcttatcaaattcagaaaactcgtttcagcctgtacccttaatctgacctttaataaggagatataccatggcgacaagtttacctacgccctcagcaattacgacttcggcgttagagtatgcattccatactcccgctcgcaatctaacgaaatctcgcggaaaaaacattcatcgttatgtcagtgtaaagatgagtaagaggattacggtagaatctactctagagtgtgatgcctgctatcactttgattttgagccaagtattgttcgcttttgcgctcaaccgattcgatttttatattatctcaatggtcagtctcactcctatgttcctgactttctagttcaatttgataccaacgagtttgttctatatgaagtaaagtcagcttatgctaagaacaaacctgattttgatgttgaatgggaggcgaaagtaaaagcagcaactgaactagggctagaattggagcttgttgaagagagtgatattagggatacggttgtattaaataatcttaagcgcatgcatcgttatgcttcgaaagatgagctgaataacgtacataactctctcttaaaaataataaagtacaatggcgcccaatctgcaagatgcttgggagaacagttgggtttaaaaggccgaactgttttaccaattttgtgcgatttgctgtcaaggtgtttactcgatacacgtttggataagcctctatctcttgaatctcgatttgagttggccagttatggctaagaaagggttctcaagtttccatagaaaagcagtctcttcccaagatacgcttgaatcgatagagcttgtctctagcgctaattgtctagaaagtgttacgtatcaagatatatcagcatttcccgaaacaattgcggtagagattaatttccgattaagcattcttcgctttttagcgcgaaagtgcgaaaccattgtggccaaatcaattgaaccacatcgtgtagagctacagcaaaactatagtagaaaaatacccagtgcaataacgatatatcgatggtggcttgcttttcgaaaatcagactacaaccccattagcttagcacctaatatcaaggatagaggtaatagagagacaaaagtgtcaacagttgttgattctattatggaacaggcagttgaaagagttatatctggacgaaaagtcaatgttagctctgcatataaacgtgttcgacgaaaagttcgtcaatacaatctaactcatggaacgaaatacacgtatcctaagtacgaatctgtaagaaagcgagtaaaaaagaaaaccccatttgagttattagccgcagggaaaggggagagagtagctaagagagagtttcgccgaatgggaaaaaagatcctcacgtctagcgtgctagagagggttgaaatagatcacactgtcgttgacctttttgcagtacacgaagagtatcgaatcccattgggccgaccttggcttactcaattggttgattgttacagtaaagctgtaatcggtttttatttaggtttcgagcctcctagctatgtgtcggtttcccttgcacttaagaatgcaatacaacgcaaagatgacttaatctcctcgtatgaatcgatcgagaatgaatggctatgttatggcatcccagacctactcgtaactgataatggtaaagagtttttgtcgaaagcatttgatcaagcatgtgaatcactattgatcaatgtgcatcaaaataaagttgagacgcccgacaacaaacctcatgttgaacgtaactacgggactattaatacttctctgttagacgatttacctgggaaatccttcagccagtaccttcaaagagaagggtacgactctgtgggagaagctacccttacactcaatgagattagagaaatttacttaatttggttggtggatatttatcataaaaaacccaatcagagaggcactaattgtcctaatgttgcgtggaaaaagggttgtcaagaatgggaaccagaggagttctctggttctaaagacgaattagactttaaatttgctattgttgattacaaacaacttactaaagtagggataactgtctacaaagaactgagttatagcaatgaccgtttagctgaatatagagggaagaaaggaaaccataaagttcagttcaagtataaccctgagtgtatggcagttatttgggtgttggatgaggatatgaatgagtactttacagttaatgcgattgactacgaatatgcaagtagagtatcactttggcaacataaatataacatgaaatatcaagcagaactaaattcagcagaatatgatgaggacaaggaaattgatgcagaaataaaaattgaagaaatcgcagatcgttcaattgttaagactaacaaaatcagagctcggaggcgtggcgctaggcatcaagagaatagcgcaagggctaagtcaatcagtaatgcgaacccggcctcgatacaaaaacatgaagatgaaatcgttagtgcagataatgacgattgggatattgattatgtctgagaaatcgtcaaatgagtgaaacgcgtgaggctcgtatatcaagagctaaaagggcatttgtatccacaccgagcgttaggaaaatcttgagttacatggatagatgtagagatctatcagacctagagtctgagcctacatgcatgatggtctatggtgcttcgggtgtaggtaaaacgaccgtcatcaagaaatacttaaatcaaaacagaagagagtccgaagccgggggcgatataataccggttttgcatattgagttgccagacaatgcgaagccagtagatgcagcaagggaattgctggttgaaatgggtgacccgctagcactttatgaaactgacttagctagattgacgaaaagactgactgaattaatccctgcggtcggcgtgaagctgattattatcgatgagttccaacatttggtggaagaaaggtcaaatcgggttcttacccaagtaggtaattggctaaaaatgatacttaacaaaacgaaatgtccaattgttatatttggtatgccatactcaaaagttgtactgcaagcaaactcgcaacttcacgggcgattttccattcaggttgaactgcgcccctttagctaccagggaggtagaggtgtatttaaaacttttttggaataccttgataaagccctaccttttgaaaaacaggctggcttagccaacgaaagtttgcagaaaaaattgtatgcattctctcagggaaacatgcgttcgttgagaaaccttatttatcaagcatctatcgaagcaattgataatcagcatgagacgataaccgaagaagatttcgtttttgcatcgaagttgacatcgggcgataaacccaactcatggaaaaatccttttgaggagggtgttgaggtaacagaagatatgttacgaccgccaccaaaagatattggttgggaggactatttgagacattcaaccccgagagtgagtaaaccaggtagaaataaaaactttttcgaataacctaggctgctgcgctgctgccaccgctgagcaataactagcataaccccttggggcctctaaacgggtcttgaggggttttttgctgaaacctcaggcatttgttgttgatacaaccataaaatgataattacacccataaattgataattatcacacccataaattgatattgcctcttcatggtctaaacttcagtaagtttacgacattttcctcgaggtcatttccggggatccatggagaaaaaaatcactggatataccaccgttgatatatcccaatggcatcgtaaagaacattttgaggcatttcagtcagttgctcaatgtacctataaccagaccgttcagctggatattacggcctttttaaagaccgtaaagaaaaataagcacaagttttatccggcctttattcacattcttgcccgcctgatgaatgctcatccggagttccgtatggcaatgaaagacggtgagctggtgatatgggatagtgttcacccttgttacaccgttttccatgagcaaactgaaacgttttcatcgctctggagtgaataccacgacgatttccggcagtttctacacatatattcgcaagatgtggcgtgttacggtgaaaacctggcctatttccctaaagggtttattgagaatatgtttttcgtctcagccaatccctgggtgagtttcaccagttttgatttaaacgtggccaatatggacaacttcttcgcccccgttttcactatgggcaaatattatacgcaaggcgacaaggtgctgatgccgctggcgattcaggttcatcatgccgtttgtgatggcttccatgtcggcagaatgcttaatgaattacaacagtactgcgatgagtggcagggcggggcgtaatttttttaaggcagttattggtgcccttctagagtccttactgcagtagttttgctgaaatactcgattcacaaaaatatcaacttatggttgttttgtgagatatcaatatatggttgttttgtggttaagttgctgattataaataattattaaatatcactttatggttgcatcaacaggtaccgagctcgaattcactggccgtcgttttacaacgtcgtgactgggaaaaccctggcgttacccaacttaatcgccttgccagttcaccgacaaacgaaagctgataatctcatgaccaaaatcccttaacgtgagttttcgttccactgagcgtcagaccccgttgatgataccgctgccttactgggtgcattagccagtctgaatgacctgtcacgggataatccgaagtggtcagactggaaaatcagagggcaggaactgctgaacagcaaaaagtcagatagcaccacatagcagacccgccataaaacgccctgagaagcccgtgacgggcttttcttgtattatgggtagtttccttgcatgaatccataaaaggcgcctgtagtgccatttacccccattcactgccagagccgtgagcgcagcgaactgaatgtcacgaaaaagacagcgactcaggtgcctgatggtcggagacaaaaggaatattcagcgatttgcccgattgcggccgcaaccgagcttgcgagggtgctacttaagcctttagggttttaaggtctgttttgtagaggagcaaacagcgtttgcgacatccttttgtaatactgcggaactgactaaagtagtgagttatacacagggctgggatctattctttttatctttttttattctttctttattctataaattataaccacttgaatataaacaaaaaaaacacacaaaggtctagcggaatttacagagggtctagcagaatttacaagttttccagcaaaggtctagcagaatttacagatacccacaactcaaaggaaaaggactagtaattatcattgactagcccatctcaattggtatagtgattaaaatcacctagaccaattgagatgtatgtctgaattagttgttttcaaagcaaatgaactagcgattagtcgctatgacttaacggagcatgaaaccaagctaattttatgctgtgtggcactactcaaccccacgattgaaaaccctacaaggaaagaacggacggtatcgttcacttataaccaatacgttcagatgatgaacatcagtagggaaaatgcttatggtgtattagctaaagcaaccagagagctgatgacgagaactgtggaaatcaggaatcctttggttaaaggctttgagattttccagtggacaaactatgccaagttctcaagcgaaaaattagaattagtttttagtgaagagatattgccttatcttttccagttaaaaaaattcataaaatataatctggaacatgttaagtcttttgaaaacaaatactctatgaggatttatgagtggttattaaaagaactaacacaaaagaaaactcacaaggcaaatatagagattagccttgatgaatttaagttcatgttaatgcttgaaaataactaccatgagtttaaaaggcttaaccaatgggttttgaaaccaataagtaaagatttaaacacttacagcaatatgaaattggtggttgataagcgaggccgcccgactgatacgttgattttccaagttgaactagatagacaaatggatctcgtaaccgaacttgagaacaaccagataaaaatgaatggtgacaaaataccaacaaccattacatcagattcctacctacataacggactaagaaaaacactacacgatgctttaactgcaaaaattcagctcaccagttttgaggcaaaatttttgagtgacatgcaaagtaagtatgatctcaatggttcgttctcatggctcacgcaaaaacaacgaaccacactagagaacatactggctaaatacggaaggatctgaggttcttatggctcttgtatctatcagtgaagca

SEQ ID NO: 71 - DNA, 12934 bp, artificial sequence
  Synthetic
aacgtggctggcctggttcaccacgcgggaaacggtctgataagagacaccggcatactctgcgacatcgtataacgttactggtttcacattcaccaccctgaattgactctcttccgggcgctatcatgccataccgcgaaaggttttgcgccattcgatggtgtccgggatctcgacgctctcccttatgcgactcctgcattaggaatggataaccgtattaccgcctttgagtgagctgataccgctcgccgcagccgaactaccgagcgcagcgagtcagtgagcgaggagcgactcctgcattaggaaattaatacgactcactataggggaattgtgagcggataacaattcccctgtagaaataattttgtttaactttaataaggagatataccatgggtgaactgccgagtaggtagctgataacagtacagcgcggctgaaatcatcattaaagcggtgaactgccgagtaggtagctgataacgcattactaagctggcgcgtgaagctgtagaagtgaactgccgagtaggtagctgataacggatccgaattcgagcgaaggagatatacatatgtttttgcaaagacctaaaccttacagcgatgaaagtttagaaagtttctttatccgagtggctaacaaaaatggctacggtgatgtccatcgcttcctagaagccactaaacgattccttcaagacattgaccataatggctatcaaacctttccgactgatataactcggataaacccatactcagctaaaaacagttccagcgcacgaactgcgtcattcctgaaacttgcacaattgacatttaatgaaccgccagagctacttgggttggcaattaacagaacaaacatgaaatactcgccgtcaactagcgcggttgttagaggtgcagaagtctttcctcgcagtttactacggacgcactccatcccctgctgtcctttgtgtctgcgagaaaatggctacgcctcctacctttggcactttcaggggtacgaatactgccacagccataacgtacctttaattaccacttgtagctgtggtaaggagtttgactaccgagtatctgggttaaagggcatttgctgcaaatgcaaggagcctatcaccttaaccagcagggagaacggtcatgaggcagcgtgtactgtttcaaactggcttgctggccatgaatctaaacctctgccaaatcttcctaaaagctaccgatggggtttagttcattggtggatgggtattaaagatagcgagttcgatcacttttcgttcgttcaatttttctcaaactggccaaggtcattccactcgataatcgaagatgaagtagagttcaaccttgagcatgctgttgtcagcacgtctgaattacgactaaaagatcttcttggtcgattgtttttcggttcaattcggttacctgagcggaatcttcaacacaatatcatccttggtgagcttctctgctatttagaaaatcgtttatggcaagacaagggattaatcgccaacctcaaaatgaacgcgttagaggcgactgtaatgttaaattgtagcctcgatcagattgcatcaatggttgaacaacgcatcttgaagccaaatcgaaaaagcaagcccaacagccctcttgatgttaccgattatctatttcatttcggcgatattttctgtctttggttagctgagttccaaagcgatgagtttaaccgttcgttttatgtgtcgaggtggtaaatgcaaactctgaaagaactaatcgcatccaatcctgacgacttaacaactgaacttaagagagcatttcgtccactcacaccgcatattgcaattgatggtaatgaacttgacgcactgacgatattagtcaatttaaccgataagactgatgatcagaaagacctgctcgatcgagccaaatgcaagcaaaaacttcgagatgaaaaatggtgggctagctgcataaattgcgttaattacagacaaagccataacccaaaattcccggatatacgttctgaaggcgtgattcgaacccaagccctgggtgaattaccgagtttcctactctcgtcctcaaaaatcccaccataccattggtcatatagccatgattcaaaatacgtcaacaaaagcgcattcctcaccaatgagttttgttgggatggtgagatctcatgtttgggtgagcttcttaaagatgcagatcacccactttggaatactttgaaaaagttaggttgttctcaaaaaacttgcaaagcaatggcaaaacaactagctgatattactctcacgactatcaatgtcacactcgcaccaaattacctgactcaaatatctctccccgatagtgatacatcctacatttcactctctcctgttgcatcgctatcgatgcaaagccactttcatcagaggctccaagatgaaaatcggcatagcgcgataacgcggtttagccgaactaccaacatgggggtcactgcgatgacatgtggcggcgcatttagaatgttaaagtctggcgctaagttttccagcccccctcatcaccgattaaacagtaaacgaagttggttgacgtcagagcatgttcagtcattaaaacagtaccagcgcctcaacaaaagcctcatacctgaaaactctcggattgcactccgtagaaaatacaaaatcgagcttcaaaatatggtcagatcttggtttgcaatgcaagaccatacccttgattcgaacatacttatccaacatttgaatcatgacctatcttacttaggagccacaaaacgttttgcatacgatccagcgatgaccaagctctttactgagcttttgaaacgagagttatcaaattcaatcaataatggtgagcaacacactaatggatcgtttttagtcctaccgaatatcagggtttgtggcgcaacagctttaagctccccggtaacggtggggattccatcacttacagctttctttggcttcgttcacgcatttgaacggaatataaatcgcaccacctcatcgtttcgtgttgaatcctttgcgatatgcgtccatcaactacatgtcgagaagcgaggtttgacagcagagtttgtggaaaaaggcgacgggactatatccgctcccgcgacccgggatgactggcagtgtgatgtcgtatttagccttattttgaacaccaactttgctcaacatattgaccaagatacgttagttacatcactaccaaagcgattggctcggggttcagcaaaaattgcgattgatgactttaaacatatcaactcattctcgacattagaaacagcgatcgaatctctgccaatagaagctggtaggtggttatcactttacgcacagtcaaacaataatctaagtgatctattagcagccatgacagaggaccatcagctcatggcaagctgcgtcggttaccacttgttagaagagcccaaagataaaccaaactccctcagaggttacaaacacgctatcgccgagtgcatcattggactcattaactcaatcacctttagctcagagactgatcccaacacaatcttttggtcgctaaagaactatcaaaactacctagtggtacagccaaggagtatcaacgatgaaactaccgacaaatctagcctatgagcgctctatcgacccatcagatgtctgtttttttgtcgtctggcccgatgatagaaaaacacctttaacctacaattctcgtactctgctcgggcaaatggaagcggcatcattagcctatgatgtctcaggtcaaccaataaaaagtgccaccgctgaggcgttagctcaagggaaccctcatcaagttgatttctgccacgttccatacggtgcgagtcatattgaatgcagtttctccgtctcgttttcttctgaactacgtcaaccatataagtgtaactcaagcaaagttaaacaaacgctagtgcaattagtcgagctctacgaaacgaaaatcggctggactgagctagcaacccgatatttgatgaacatttgcaacggtaaatggctgtggaaaaatacccgtaaagcctattgctggaacattgtacttacaccttggccttggaacggggaaaaggttggatttgaagatattcgtactaactacacctcacggcaagactttaaaaataataaaaattggtctgctatagttgaaatgatcaaaaccgcattttctagtactgatgggctggcgatatttgaagtcagggccaccttgcacttgccaacgaatgctatggtgcggccaagccaagttttcacagaaaaagaaagtggcagtaaaagtaaatctaaaactcaaaacagtcgagtttttcagagtacaactattgatggtgaacgatcgccaatactaggggcctttaaaacgggagcagctattgcaaccattgacgactggtatcctgaagccactgagccactaagggtcggacggtttggggttcatcgcgaagatgtcacttgctaccgtcatccgtctaccggaaaagattttttctcgatattacaacaagcagagcactatattgaagtgttgagcgccaacaaaactcccgctcaagaaactatcaacgacatgcactttttaatggctaacctgattaagggtgggatgttccagcataaaggagactgactgtgaaatggtattataagacaatcacctttctgccagagttgtgcaacaacgagtcactggctgcaaagtgtctccgcgttctgcatggatttaactatcagtatgagacacgaaatatcggcgtttcatttccgctttggtgtgatgcaacggttggaaaaaagatttcatttgtcagcaagaacaagatagaactcgacttactacttaaacaacactatttcgtccaaatggaacaacttcaatactttcatatatccaacactgttctcgtcccagaagattgtacatacgtttcctttagacgctgtcaatctatagataagctcacagcagcagggctggcaaggaaaatcagacgcctggagaaacgtgctctatctagaggcgagcaatttgacccatcatcttttgctcaaaaagagcatactgcaatagcgcactaccactcacttggggagtccagcaaacagacgaaccgcaactttcgactcaatatcaggatgctctcggagcaaccccgtgaggggaactcgatttttagtagctatggcttatcaaattcagaaaactcgtttcagcctgtacccttaatctgacctttaataaggagatataccatggcgacaagtttacctacgccctcagcaattacgacttcggcgttagagtatgcattccatactcccgctcgcaatctaacgaaatctcgcggaaaaaacattcatcgttatgtcagtgtaaagatgagtaagaggattacggtagaatctactctagagtgtgatgcctgctatcactttgattttgagccaagtattgttcgcttttgcgctcaaccgattcgatttttatattatctcaatggtcagtctcactcctatgttcctgactttctagttcaatttgataccaacgagtttgttctatatgaagtaaagtcagcttatgctaagaacaaacctgattttgatgttgaatgggaggcgaaagtaaaagcagcaactgaactagggctagaattggagcttgttgaagagagtgatattagggatacggttgtattaaataatcttaagcgcatgcatcgttatgcttcgaaagatgagctgaataacgtacataactctctcttaaaaataataaagtacaatggcgcccaatctgcaagatgcttgggagaacagttgggtttaaaaggccgaactgttttaccaattttgtgcgatttgctgtcaaggtgtttactcgatacacgtttggataagcctctatctcttgaatctcgatttgagttggccagttatggctaagaaagggttctcaagtttccatagaaaagcagtctcttcccaagatacgcttgaatcgatagagcttgtctctagcgctaattgtctagaaagtgttacgtatcaagatatatcagcatttcccgaaacaattgcggtagagattaatttccgattaagcattcttcgctttttagcgcgaaagtgcgaaaccattgtggccaaatcaattgaaccacatcgtgtagagctacagcaaaactatagtagaaaaatacccagtgcaataacgatatatcgatggtggcttgcttttcgaaaatcagactacaaccccattagcttagcacctaatatcaaggatagaggtaatagagagacaaaagtgtcaacagttgttgattctattatggaacaggcagttgaaagagttatatctggacgaaaagtcaatgttagctctgcatataaacgtgttcgacgaaaagttcgtcaatacaatctaactcatggaacgaaatacacgtatcctaagtacgaatctgtaagaaagcgagtaaaaaagaaaaccccatttgagttattagccgcagggaaaggggagagagtagctaagagagagtttcgccgaatgggaaaaaagatcctcacgtctagcgtgctagagagggttgaaatagatcacactgtcgttgacctttttgcagtacacgaagagtatcgaatcccattgggccgaccttggcttactcaattggttgattgttacagtaaagctgtaatcggtttttatttaggtttcgagcctcctagctatgtgtcggtttcccttgcacttaagaatgcaatacaacgcaaagatgacttaatctcctcgtatgaatcgatcgagaatgaatggctatgttatggcatcccagacctactcgtaactgataatggtaaagagtttttgtcgaaagcatttgatcaagcatgtgaatcactattgatcaatgtgcatcaaaataaagttgagacgcccgacaacaaacctcatgttgaacgtaactacgggactattaatacttctctgttagacgatttacctgggaaatccttcagccagtaccttcaaagagaagggtacgactctgtgggagaagctacccttacactcaatgagattagagaaatttacttaatttggttggtggatatttatcataaaaaacccaatcagagaggcactaattgtcctaatgttgcgtggaaaaagggttgtcaagaatgggaaccagaggagttctctggttctaaagacgaattagactttaaatttgctattgttgattacaaacaacttactaaagtagggataactgtctacaaagaactgagttatagcaatgaccgtttagctgaatatagagggaagaaaggaaaccataaagttcagttcaagtataaccctgagtgtatggcagttatttgggtgttggatgaggatatgaatgagtactttacagttaatgcgattgactacgaatatgcaagtagagtatcactttggcaacataaatataacatgaaatatcaagcagaactaaattcagcagaatatgatgaggacaaggaaattgatgcagaaataaaaattgaagaaatcgcagatcgttcaattgttaagactaacaaaatcagagctcggaggcgtggcgctaggcatcaagagaatagcgcaagggctaagtcaatcagtaatgcgaacccggcctcgatacaaaaacatgaagatgaaatcgttagtgcagataatgacgattgggatattgattatgtctgagaaatcgtcaaatgagtgaaacgcgtgaggctcgtatatcaagagctaaaagggcatttgtatccacaccgagcgttaggaaaatcttgagttacatggatagatgtagagatctatcagacctagagtctgagcctacatgcatgatggtctatggtgcttcgggtgtaggtaaaacgaccgtcatcaagaaatacttaaatcaaaacagaagagagtccgaagccgggggcgatataataccggttttgcatattgagttgccagacaatgcgaagccagtagatgcagcaagggaattgctggttgaaatgggtgacccgctagcactttatgaaactgacttagctagattgacgaaaagactgactgaattaatccctgcggtcggcgtgaagctgattattatcgatgagttccaacatttggtggaagaaaggtcaaatcgggttcttacccaagtaggtaattggctaaaaatgatacttaacaaaacgaaatgtccaattgttatatttggtatgccatactcaaaagttgtactgcaagcaaactcgcaacttcacgggcgattttccattcaggttgaactgcgcccctttagctaccagggaggtagaggtgtatttaaaacttttttggaataccttgataaagccctaccttttgaaaaacaggctggcttagccaacgaaagtttgcagaaaaaattgtatgcattctctcagggaaacatgcgttcgttgagaaaccttatttatcaagcatctatcgaagcaattgataatcagcatgagacgataaccgaagaagatttcgtttttgcatcgaagttgacatcgggcgataaacccaactcatggaaaaatccttttgaggagggtgttgaggtaacagaagatatgttacgaccgccaccaaaagatattggttgggaggactatttgagacattcaaccccgagagtgagtaaaccaggtagaaataaaaactttttcgaataacctaggctgctgcgctgctgccaccgctgagcaataactagcataaccccttggggcctctaaacgggtcttgaggggttttttgctgaaacctcaggcatttgttgttgatacaaccataaaatgataattacacccataaattgataattatcacacccataaattgatattgcctcttcatggtctaaacttcagtaagtttacgacattttcctcgaggtcatttccggggatccatggagaaaaaaatcactggatataccaccgttgatatatcccaatggcatcgtaaagaacattttgaggcatttcagtcagttgctcaatgtacctataaccagaccgttcagctggatattacggcctttttaaagaccgtaaagaaaaataagcacaagttttatccggcctttattcacattcttgcccgcctgatgaatgctcatccggagttccgtatggcaatgaaagacggtgagctggtgatatgggatagtgttcacccttgttacaccgttttccatgagcaaactgaaacgttttcatcgctctggagtgaataccacgacgatttccggcagtttctacacatatattcgcaagatgtggcgtgttacggtgaaaacctggcctatttccctaaagggtttattgagaatatgtttttcgtctcagccaatccctgggtgagtttcaccagttttgatttaaacgtggccaatatggacaacttcttcgcccccgttttcactatgggcaaatattatacgcaaggcgacaaggtgctgatgccgctggcgattcaggttcatcatgccgtttgtgatggcttccatgtcggcagaatgcttaatgaattacaacagtactgcgatgagtggcagggcggggcgtaatttttttaaggcagttattggtgcccttctagagtccttactgcagtagttttgctgaaatactcgattcacaaaaatatcaacttatggttgttttgtgagatatcaatatatggttgttttgtggttaagttgctgattataaataattattaaatatcactttatggttgcatcaacaggtaccgagctcgaattcactggccgtcgttttacaacgtcgtgactgggaaaaccctggcgttacccaacttaatcgccttgctatcgtggccggatcttgcggcccctcggcttgaacgaattgttagacattatttgccgactaccttggtgatctcgcctttcacgtagtggacaaattcttccaactgatctgcgcgcgaggccaagcgatcttcttcttgtccaagataagcctgtctagcttcaagtatgacgggctgatactgggccggcaggcgctccattgcccagtcggcagcgacatccttcggcgcgattttgccggttactgcgctgtaccaaatgcgggacaacgtaagcactacatttcgctcatcgccagcccagtcgggcggcgagttccatagcgttaaggtttcatttagcgcctcaaatagatcctgttcaggaaccggatcaaagagttcctccgccgctggacctaccaaggcaacgctatgttctcttgcttttgtcagcaagatagccagatcaatgtcgatcgtggctggctcgaagatacctgcaagaatgtcattgcgctgccattctccaaattgcagttcgcgcttagctggataacgccacggaatgatgtcgtcgtgcacaacaatggtgacttctacagcgcggagaatctcgctctctccaggggaagccgaagtttccaaaaggtcgttgatcaaagctcgccgcgttgtttcatcaagccttacggtcaccgtaaccagcaaatcaatatcactgtgtggcttcaggccgccatccactgcggagccgtacaaatgtacggccagcaacgtcggttcgagatggcgctcgatgacgccaactacctctgatagttgagtcgatacttcggcgatcaccgcttccctcatactcttcctttttcaatattattgaagcatttatcagggttattgtctcatgagcggatacatatttgaatgtatttagaaaaataaacaaatagctagctcactcggtcgctacgctccgggcgtgagactgcggcgggcgctgcggacacatacaaagttacccacagattccgtggataagcaggggactaacatgtgaggcaaaacagcagggccgcgccggtggcgtttttccataggctccgccctcctgccagagttcacataaacagacgcttttccggtgcatctgtgggagccgtgaggctcaaccatgaatctgacagtacgggcgaaacccgacaggacttaaagatccccaccgtttccggcgggtcgctccctcttgcgctctcctgttccgaccctgccgtttaccggatacctgttccgcctttctcccttacgggaagtgtggcgctttctcatagctcacacactggtatctcggctcggtgtaggtcgttcgctccaagctgggctgtaagcaagaactccccgttcagcccgactgctgcgccttatccggtaactgttcacttgagtccaacccggaaaagcacggtaaaacgccactggcagcagccattggtaactgggagttcgcagaggatttgtttagctaaacacgcggttgctcttgaagtgtgcgccaaagtccggctacactggaaggacagatttggttgctgtgctctgcgaaagccagttaccacggttaagcagttccccaactgacttaaccttcgatcaaaccacctccccaggtggttttttcgtttacagggcaaaagattacgcgcagaaaaaaaggatctcaagaagatcctttgatcttttctactgaaccgctctagatttcagtgcaatttatctcttcaaatgtagcacctgaagtcagccccatacgatataagttgtaattctcatgttagtcatgccccgcgcccaccggaaggagctgactgggttgaaggctctcaagggcatcggtcgagatcccggtgcctaatgagtgagctaacttacattaattgcgttgcgctcactgcccgctttccagtcgggaaacctgtcgtgccagctgcattaatgaatcggccaacgcgcggggagaggcggtttgcgtattgggcgccagggtggtttttcttttcaccagtgagacgggcaacagctgattgcccttcaccgcctggccctgagagagttgcagcaagcggtccacgctggtttgccccagcaggcgaaaatcctgtttgatggtggttaacggcgggatataacatgagctgtcttcggtatcgtcgtatcccactaccgagatgtccgcaccaacgcgcagcccggactcggtaatggcgcgcattgcgcccagcgccatctgatcgttggcaaccagcatcgcagtgggaacgatgccctcattcagcatttgcatggtttgttgaaaaccggacatggcactccagtcgccttcccgttccgctatcggctgaatttgattgcgagtgagatatttatgccagccagccagacgcagacgcgccgagacagaacttaatgggcccgctaacagcgcgatttgctggtgacccaatgcgaccagatgctccacgcccagtcgcgtaccgtcttcatgggagaaaataatactgttgatgggtgtctggtcagagacatcaagaaataacgccggaacattagtgcaggcagcttccacagcaatggcatcctggtcatccagcggatagttaatgatcagcccactgacgcgttgcgcgagaagattgtgcaccgccgctttacaggcttcgacgccgcttcgttctaccatcgacaccaccacgctggcacccagttgatcggcgcgagatttaatcgccgcgacaatttgcgacggcgcgtgcagggccagactggaggtggcaacgccaatcagcaacgactgtttgcccgccagttgttgtgccacgcggttgggaatgtaattcagctccgccatcgccgcttccactttttcccgcgttttcgcaga

SEQ ID NO: 72 - DNA, 12994 bp, artificial sequence
  Synthetic
aacgtggctggcctggttcaccacgcgggaaacggtctgataagagacaccggcatactctgcgacatcgtataacgttactggtttcacattcaccaccctgaattgactctcttccgggcgctatcatgccataccgcgaaaggttttgcgccattcgatggtgtccgggatctcgacgctctcccttatgcgactcctgcattaggaatggataaccgtattaccgcctttgagtgagctgataccgctcgccgcagccgaactaccgagcgcagcgagtcagtgagcgaggagcgactcctgcattaggaaattaatacgactcactataggggaattgtgagcggataacaattcccctgtagaaataattttgtttaactttaataaggagatataccatgggtgaactgccgagtaggtagctgataacagtacagcgcggctgaaatcatcattaaagcggtgaactgccgagtaggtagctgataacgcattactaagctggcgcgtgaagctgtagaagtgaactgccgagtaggtagctgataactgggaggattcataaagcattgtttgttggctgtgaactgccgagtaggtagctgataacggatccgaattcgagcgaaggagatatacatatgtttttgcaaagacctaaaccttacagcgatgaaagtttagaaagtttctttatccgagtggctaacaaaaatggctacggtgatgtccatcgcttcctagaagccactaaacgattccttcaagacattgaccataatggctatcaaacctttccgactgatataactcggataaacccatactcagctaaaaacagttccagcgcacgaactgcgtcattcctgaaacttgcacaattgacatttaatgaaccgccagagctacttgggttggcaattaacagaacaaacatgaaatactcgccgtcaactagcgcggttgttagaggtgcagaagtctttcctcgcagtttactacggacgcactccatcccctgctgtcctttgtgtctgcgagaaaatggctacgcctcctacctttggcactttcaggggtacgaatactgccacagccataacgtacctttaattaccacttgtagctgtggtaaggagtttgactaccgagtatctgggttaaagggcatttgctgcaaatgcaaggagcctatcaccttaaccagcagggagaacggtcatgaggcagcgtgtactgtttcaaactggcttgctggccatgaatctaaacctctgccaaatcttcctaaaagctaccgatggggtttagttcattggtggatgggtattaaagatagcgagttcgatcacttttcgttcgttcaatttttctcaaactggccaaggtcattccactcgataatcgaagatgaagtagagttcaaccttgagcatgctgttgtcagcacgtctgaattacgactaaaagatcttcttggtcgattgtttttcggttcaattcggttacctgagcggaatcttcaacacaatatcatccttggtgagcttctctgctatttagaaaatcgtttatggcaagacaagggattaatcgccaacctcaaaatgaacgcgttagaggcgactgtaatgttaaattgtagcctcgatcagattgcatcaatggttgaacaacgcatcttgaagccaaatcgaaaaagcaagcccaacagccctcttgatgttaccgattatctatttcatttcggcgatattttctgtctttggttagctgagttccaaagcgatgagtttaaccgttcgttttatgtgtcgaggtggtaaatgcaaactctgaaagaactaatcgcatccaatcctgacgacttaacaactgaacttaagagagcatttcgtccactcacaccgcatattgcaattgatggtaatgaacttgacgcactgacgatattagtcaatttaaccgataagactgatgatcagaaagacctgctcgatcgagccaaatgcaagcaaaaacttcgagatgaaaaatggtgggctagctgcataaattgcgttaattacagacaaagccataacccaaaattcccggatatacgttctgaaggcgtgattcgaacccaagccctgggtgaattaccgagtttcctactctcgtcctcaaaaatcccaccataccattggtcatatagccatgattcaaaatacgtcaacaaaagcgcattcctcaccaatgagttttgttgggatggtgagatctcatgtttgggtgagcttcttaaagatgcagatcacccactttggaatactttgaaaaagttaggttgttctcaaaaaacttgcaaagcaatggcaaaacaactagctgatattactctcacgactatcaatgtcacactcgcaccaaattacctgactcaaatatctctccccgatagtgatacatcctacatttcactctctcctgttgcatcgctatcgatgcaaagccactttcatcagaggctccaagatgaaaatcggcatagcgcgataacgcggtttagccgaactaccaacatgggggtcactgcgatgacatgtggcggcgcatttagaatgttaaagtctggcgctaagttttccagcccccctcatcaccgattaaacagtaaacgaagttggttgacgtcagagcatgttcagtcattaaaacagtaccagcgcctcaacaaaagcctcatacctgaaaactctcggattgcactccgtagaaaatacaaaatcgagcttcaaaatatggtcagatcttggtttgcaatgcaagaccatacccttgattcgaacatacttatccaacatttgaatcatgacctatcttacttaggagccacaaaacgttttgcatacgatccagcgatgaccaagctctttactgagcttttgaaacgagagttatcaaattcaatcaataatggtgagcaacacactaatggatcgtttttagtcctaccgaatatcagggtttgtggcgcaacagctttaagctccccggtaacggtggggattccatcacttacagctttctttggcttcgttcacgcatttgaacggaatataaatcgcaccacctcatcgtttcgtgttgaatcctttgcgatatgcgtccatcaactacatgtcgagaagcgaggtttgacagcagagtttgtggaaaaaggcgacgggactatatccgctcccgcgacccgggatgactggcagtgtgatgtcgtatttagccttattttgaacaccaactttgctcaacatattgaccaagatacgttagttacatcactaccaaagcgattggctcggggttcagcaaaaattgcgattgatgactttaaacatatcaactcattctcgacattagaaacagcgatcgaatctctgccaatagaagctggtaggtggttatcactttacgcacagtcaaacaataatctaagtgatctattagcagccatgacagaggaccatcagctcatggcaagctgcgtcggttaccacttgttagaagagcccaaagataaaccaaactccctcagaggttacaaacacgctatcgccgagtgcatcattggactcattaactcaatcacctttagctcagagactgatcccaacacaatcttttggtcgctaaagaactatcaaaactacctagtggtacagccaaggagtatcaacgatgaaactaccgacaaatctagcctatgagcgctctatcgacccatcagatgtctgtttttttgtcgtctggcccgatgatagaaaaacacctttaacctacaattctcgtactctgctcgggcaaatggaagcggcatcattagcctatgatgtctcaggtcaaccaataaaaagtgccaccgctgaggcgttagctcaagggaaccctcatcaagttgatttctgccacgttccatacggtgcgagtcatattgaatgcagtttctccgtctcgttttcttctgaactacgtcaaccatataagtgtaactcaagcaaagttaaacaaacgctagtgcaattagtcgagctctacgaaacgaaaatcggctggactgagctagcaacccgatatttgatgaacatttgcaacggtaaatggctgtggaaaaatacccgtaaagcctattgctggaacattgtacttacaccttggccttggaacggggaaaaggttggatttgaagatattcgtactaactacacctcacggcaagactttaaaaataataaaaattggtctgctatagttgaaatgatcaaaaccgcattttctagtactgatgggctggcgatatttgaagtcagggccaccttgcacttgccaacgaatgctatggtgcggccaagccaagttttcacagaaaaagaaagtggcagtaaaagtaaatctaaaactcaaaacagtcgagtttttcagagtacaactattgatggtgaacgatcgccaatactaggggcctttaaaacgggagcagctattgcaaccattgacgactggtatcctgaagccactgagccactaagggtcggacggtttggggttcatcgcgaagatgtcacttgctaccgtcatccgtctaccggaaaagattttttctcgatattacaacaagcagagcactatattgaagtgttgagcgccaacaaaactcccgctcaagaaactatcaacgacatgcactttttaatggctaacctgattaagggtgggatgttccagcataaaggagactgactgtgaaatggtattataagacaatcacctttctgccagagttgtgcaacaacgagtcactggctgcaaagtgtctccgcgttctgcatggatttaactatcagtatgagacacgaaatatcggcgtttcatttccgctttggtgtgatgcaacggttggaaaaaagatttcatttgtcagcaagaacaagatagaactcgacttactacttaaacaacactatttcgtccaaatggaacaacttcaatactttcatatatccaacactgttctcgtcccagaagattgtacatacgtttcctttagacgctgtcaatctatagataagctcacagcagcagggctggcaaggaaaatcagacgcctggagaaacgtgctctatctagaggcgagcaatttgacccatcatcttttgctcaaaaagagcatactgcaatagcgcactaccactcacttggggagtccagcaaacagacgaaccgcaactttcgactcaatatcaggatgctctcggagcaaccccgtgaggggaactcgatttttagtagctatggcttatcaaattcagaaaactcgtttcagcctgtacccttaatctgacctttaataaggagatataccatggcgacaagtttacctacgccctcagcaattacgacttcggcgttagagtatgcattccatactcccgctcgcaatctaacgaaatctcgcggaaaaaacattcatcgttatgtcagtgtaaagatgagtaagaggattacggtagaatctactctagagtgtgatgcctgctatcactttgattttgagccaagtattgttcgcttttgcgctcaaccgattcgatttttatattatctcaatggtcagtctcactcctatgttcctgactttctagttcaatttgataccaacgagtttgttctatatgaagtaaagtcagcttatgctaagaacaaacctgattttgatgttgaatgggaggcgaaagtaaaagcagcaactgaactagggctagaattggagcttgttgaagagagtgatattagggatacggttgtattaaataatcttaagcgcatgcatcgttatgcttcgaaagatgagctgaataacgtacataactctctcttaaaaataataaagtacaatggcgcccaatctgcaagatgcttgggagaacagttgggtttaaaaggccgaactgttttaccaattttgtgcgatttgctgtcaaggtgtttactcgatacacgtttggataagcctctatctcttgaatctcgatttgagttggccagttatggctaagaaagggttctcaagtttccatagaaaagcagtctcttcccaagatacgcttgaatcgatagagcttgtctctagcgctaattgtctagaaagtgttacgtatcaagatatatcagcatttcccgaaacaattgcggtagagattaatttccgattaagcattcttcgctttttagcgcgaaagtgcgaaaccattgtggccaaatcaattgaaccacatcgtgtagagctacagcaaaactatagtagaaaaatacccagtgcaataacgatatatcgatggtggcttgcttttcgaaaatcagactacaaccccattagcttagcacctaatatcaaggatagaggtaatagagagacaaaagtgtcaacagttgttgattctattatggaacaggcagttgaaagagttatatctggacgaaaagtcaatgttagctctgcatataaacgtgttcgacgaaaagttcgtcaatacaatctaactcatggaacgaaatacacgtatcctaagtacgaatctgtaagaaagcgagtaaaaaagaaaaccccatttgagttattagccgcagggaaaggggagagagtagctaagagagagtttcgccgaatgggaaaaaagatcctcacgtctagcgtgctagagagggttgaaatagatcacactgtcgttgacctttttgcagtacacgaagagtatcgaatcccattgggccgaccttggcttactcaattggttgattgttacagtaaagctgtaatcggtttttatttaggtttcgagcctcctagctatgtgtcggtttcccttgcacttaagaatgcaatacaacgcaaagatgacttaatctcctcgtatgaatcgatcgagaatgaatggctatgttatggcatcccagacctactcgtaactgataatggtaaagagtttttgtcgaaagcatttgatcaagcatgtgaatcactattgatcaatgtgcatcaaaataaagttgagacgcccgacaacaaacctcatgttgaacgtaactacgggactattaatacttctctgttagacgatttacctgggaaatccttcagccagtaccttcaaagagaagggtacgactctgtgggagaagctacccttacactcaatgagattagagaaatttacttaatttggttggtggatatttatcataaaaaacccaatcagagaggcactaattgtcctaatgttgcgtggaaaaagggttgtcaagaatgggaaccagaggagttctctggttctaaagacgaattagactttaaatttgctattgttgattacaaacaacttactaaagtagggataactgtctacaaagaactgagttatagcaatgaccgtttagctgaatatagagggaagaaaggaaaccataaagttcagttcaagtataaccctgagtgtatggcagttatttgggtgttggatgaggatatgaatgagtactttacagttaatgcgattgactacgaatatgcaagtagagtatcactttggcaacataaatataacatgaaatatcaagcagaactaaattcagcagaatatgatgaggacaaggaaattgatgcagaaataaaaattgaagaaatcgcagatcgttcaattgttaagactaacaaaatcagagctcggaggcgtggcgctaggcatcaagagaatagcgcaagggctaagtcaatcagtaatgcgaacccggcctcgatacaaaaacatgaagatgaaatcgttagtgcagataatgacgattgggatattgattatgtctgagaaatcgtcaaatgagtgaaacgcgtgaggctcgtatatcaagagctaaaagggcatttgtatccacaccgagcgttaggaaaatcttgagttacatggatagatgtagagatctatcagacctagagtctgagcctacatgcatgatggtctatggtgcttcgggtgtaggtaaaacgaccgtcatcaagaaatacttaaatcaaaacagaagagagtccgaagccgggggcgatataataccggttttgcatattgagttgccagacaatgcgaagccagtagatgcagcaagggaattgctggttgaaatgggtgacccgctagcactttatgaaactgacttagctagattgacgaaaagactgactgaattaatccctgcggtcggcgtgaagctgattattatcgatgagttccaacatttggtggaagaaaggtcaaatcgggttcttacccaagtaggtaattggctaaaaatgatacttaacaaaacgaaatgtccaattgttatatttggtatgccatactcaaaagttgtactgcaagcaaactcgcaacttcacgggcgattttccattcaggttgaactgcgcccctttagctaccagggaggtagaggtgtatttaaaacttttttggaataccttgataaagccctaccttttgaaaaacaggctggcttagccaacgaaagtttgcagaaaaaattgtatgcattctctcagggaaacatgcgttcgttgagaaaccttatttatcaagcatctatcgaagcaattgataatcagcatgagacgataaccgaagaagatttcgtttttgcatcgaagttgacatcgggcgataaacccaactcatggaaaaatccttttgaggagggtgttgaggtaacagaagatatgttacgaccgccaccaaaagatattggttgggaggactatttgagacattcaaccccgagagtgagtaaaccaggtagaaataaaaactttttcgaataacctaggctgctgcgctgctgccaccgctgagcaataactagcataaccccttggggcctctaaacgggtcttgaggggttttttgctgaaacctcaggcatttgttgttgatacaaccataaaatgataattacacccataaattgataattatcacacccataaattgatattgcctcttcatggtctaaacttcagtaagtttacgacattttcctcgaggtcatttccggggatccatggagaaaaaaatcactggatataccaccgttgatatatcccaatggcatcgtaaagaacattttgaggcatttcagtcagttgctcaatgtacctataaccagaccgttcagctggatattacggcctttttaaagaccgtaaagaaaaataagcacaagttttatccggcctttattcacattcttgcccgcctgatgaatgctcatccggagttccgtatggcaatgaaagacggtgagctggtgatatgggatagtgttcacccttgttacaccgttttccatgagcaaactgaaacgttttcatcgctctggagtgaataccacgacgatttccggcagtttctacacatatattcgcaagatgtggcgtgttacggtgaaaacctggcctatttccctaaagggtttattgagaatatgtttttcgtctcagccaatccctgggtgagtttcaccagttttgatttaaacgtggccaatatggacaacttcttcgcccccgttttcactatgggcaaatattatacgcaaggcgacaaggtgctgatgccgctggcgattcaggttcatcatgccgtttgtgatggcttccatgtcggcagaatgcttaatgaattacaacagtactgcgatgagtggcagggcggggcgtaatttttttaaggcagttattggtgcccttctagagtccttactgcagtagttttgctgaaatactcgattcacaaaaatatcaacttatggttgttttgtgagatatcaatatatggttgttttgtggttaagttgctgattataaataattattaaatatcactttatggttgcatcaacaggtaccgagctcgaattcactggccgtcgttttacaacgtcgtgactgggaaaaccctggcgttacccaacttaatcgccttgctatcgtggccggatcttgcggcccctcggcttgaacgaattgttagacattatttgccgactaccttggtgatctcgcctttcacgtagtggacaaattcttccaactgatctgcgcgcgaggccaagcgatcttcttcttgtccaagataagcctgtctagcttcaagtatgacgggctgatactgggccggcaggcgctccattgcccagtcggcagcgacatccttcggcgcgattttgccggttactgcgctgtaccaaatgcgggacaacgtaagcactacatttcgctcatcgccagcccagtcgggcggcgagttccatagcgttaaggtttcatttagcgcctcaaatagatcctgttcaggaaccggatcaaagagttcctccgccgctggacctaccaaggcaacgctatgttctcttgcttttgtcagcaagatagccagatcaatgtcgatcgtggctggctcgaagatacctgcaagaatgtcattgcgctgccattctccaaattgcagttcgcgcttagctggataacgccacggaatgatgtcgtcgtgcacaacaatggtgacttctacagcgcggagaatctcgctctctccaggggaagccgaagtttccaaaaggtcgttgatcaaagctcgccgcgttgtttcatcaagccttacggtcaccgtaaccagcaaatcaatatcactgtgtggcttcaggccgccatccactgcggagccgtacaaatgtacggccagcaacgtcggttcgagatggcgctcgatgacgccaactacctctgatagttgagtcgatacttcggcgatcaccgcttccctcatactcttcctttttcaatattattgaagcatttatcagggttattgtctcatgagcggatacatatttgaatgtatttagaaaaataaacaaatagctagctcactcggtcgctacgctccgggcgtgagactgcggcgggcgctgcggacacatacaaagttacccacagattccgtggataagcaggggactaacatgtgaggcaaaacagcagggccgcgccggtggcgtttttccataggctccgccctcctgccagagttcacataaacagacgcttttccggtgcatctgtgggagccgtgaggctcaaccatgaatctgacagtacgggcgaaacccgacaggacttaaagatccccaccgtttccggcgggtcgctccctcttgcgctctcctgttccgaccctgccgtttaccggatacctgttccgcctttctcccttacgggaagtgtggcgctttctcatagctcacacactggtatctcggctcggtgtaggtcgttcgctccaagctgggctgtaagcaagaactccccgttcagcccgactgctgcgccttatccggtaactgttcacttgagtccaacccggaaaagcacggtaaaacgccactggcagcagccattggtaactgggagttcgcagaggatttgtttagctaaacacgcggttgctcttgaagtgtgcgccaaagtccggctacactggaaggacagatttggttgctgtgctctgcgaaagccagttaccacggttaagcagttccccaactgacttaaccttcgatcaaaccacctccccaggtggttttttcgtttacagggcaaaagattacgcgcagaaaaaaaggatctcaagaagatcctttgatcttttctactgaaccgctctagatttcagtgcaatttatctcttcaaatgtagcacctgaagtcagccccatacgatataagttgtaattctcatgttagtcatgccccgcgcccaccggaaggagctgactgggttgaaggctctcaagggcatcggtcgagatcccggtgcctaatgagtgagctaacttacattaattgcgttgcgctcactgcccgctttccagtcgggaaacctgtcgtgccagctgcattaatgaatcggccaacgcgcggggagaggcggtttgcgtattgggcgccagggtggtttttcttttcaccagtgagacgggcaacagctgattgcccttcaccgcctggccctgagagagttgcagcaagcggtccacgctggtttgccccagcaggcgaaaatcctgtttgatggtggttaacggcgggatataacatgagctgtcttcggtatcgtcgtatcccactaccgagatgtccgcaccaacgcgcagcccggactcggtaatggcgcgcattgcgcccagcgccatctgatcgttggcaaccagcatcgcagtgggaacgatgccctcattcagcatttgcatggtttgttgaaaaccggacatggcactccagtcgccttcccgttccgctatcggctgaatttgattgcgagtgagatatttatgccagccagccagacgcagacgcgccgagacagaacttaatgggcccgctaacagcgcgatttgctggtgacccaatgcgaccagatgctccacgcccagtcgcgtaccgtcttcatgggagaaaataatactgttgatgggtgtctggtcagagacatcaagaaataacgccggaacattagtgcaggcagcttccacagcaatggcatcctggtcatccagcggatagttaatgatcagcccactgacgcgttgcgcgagaagattgtgcaccgccgctttacaggcttcgacgccgcttcgttctaccatcgacaccaccacgctggcacccagttgatcggcgcgagatttaatcgccgcgacaatttgcgacggcgcgtgcagggccagactggaggtggcaacgccaatcagcaacgactgtttgcccgccagttgttgtgccacgcggttgggaatgtaattcagctccgccatcgccgcttccactttttcccgcgttttcgcaga

SEQ ID NO: 73 - DNA, 12994 bp, artificial sequence
  Synthetic
aacgtggctggcctggttcaccacgcgggaaacggtctgataagagacaccggcatactctgcgacatcgtataacgttactggtttcacattcaccaccctgaattgactctcttccgggcgctatcatgccataccgcgaaaggttttgcgccattcgatggtgtccgggatctcgacgctctcccttatgcgactcctgcattaggaatggataaccgtattaccgcctttgagtgagctgataccgctcgccgcagccgaactaccgagcgcagcgagtcagtgagcgaggagcgactcctgcattaggaaattaatacgactcactataggggaattgtgagcggataacaattcccctgtagaaataattttgtttaactttaataaggagatataccatgggtgaactgccgagtaggtagctgataacgcattactaagctggcgcgtgaagctgtagaagtgaactgccgagtaggtagctgataacagtacagcgcggctgaaatcatcattaaagcggtgaactgccgagtaggtagctgataactgggaggattcataaagcattgtttgttggctgtgaactgccgagtaggtagctgataacggatccgaattcgagcgaaggagatatacatatgtttttgcaaagacctaaaccttacagcgatgaaagtttagaaagtttctttatccgagtggctaacaaaaatggctacggtgatgtccatcgcttcctagaagccactaaacgattccttcaagacattgaccataatggctatcaaacctttccgactgatataactcggataaacccatactcagctaaaaacagttccagcgcacgaactgcgtcattcctgaaacttgcacaattgacatttaatgaaccgccagagctacttgggttggcaattaacagaacaaacatgaaatactcgccgtcaactagcgcggttgttagaggtgcagaagtctttcctcgcagtttactacggacgcactccatcccctgctgtcctttgtgtctgcgagaaaatggctacgcctcctacctttggcactttcaggggtacgaatactgccacagccataacgtacctttaattaccacttgtagctgtggtaaggagtttgactaccgagtatctgggttaaagggcatttgctgcaaatgcaaggagcctatcaccttaaccagcagggagaacggtcatgaggcagcgtgtactgtttcaaactggcttgctggccatgaatctaaacctctgccaaatcttcctaaaagctaccgatggggtttagttcattggtggatgggtattaaagatagcgagttcgatcacttttcgttcgttcaatttttctcaaactggccaaggtcattccactcgataatcgaagatgaagtagagttcaaccttgagcatgctgttgtcagcacgtctgaattacgactaaaagatcttcttggtcgattgtttttcggttcaattcggttacctgagcggaatcttcaacacaatatcatccttggtgagcttctctgctatttagaaaatcgtttatggcaagacaagggattaatcgccaacctcaaaatgaacgcgttagaggcgactgtaatgttaaattgtagcctcgatcagattgcatcaatggttgaacaacgcatcttgaagccaaatcgaaaaagcaagcccaacagccctcttgatgttaccgattatctatttcatttcggcgatattttctgtctttggttagctgagttccaaagcgatgagtttaaccgttcgttttatgtgtcgaggtggtaaatgcaaactctgaaagaactaatcgcatccaatcctgacgacttaacaactgaacttaagagagcatttcgtccactcacaccgcatattgcaattgatggtaatgaacttgacgcactgacgatattagtcaatttaaccgataagactgatgatcagaaagacctgctcgatcgagccaaatgcaagcaaaaacttcgagatgaaaaatggtgggctagctgcataaattgcgttaattacagacaaagccataacccaaaattcccggatatacgttctgaaggcgtgattcgaacccaagccctgggtgaattaccgagtttcctactctcgtcctcaaaaatcccaccataccattggtcatatagccatgattcaaaatacgtcaacaaaagcgcattcctcaccaatgagttttgttgggatggtgagatctcatgtttgggtgagcttcttaaagatgcagatcacccactttggaatactttgaaaaagttaggttgttctcaaaaaacttgcaaagcaatggcaaaacaactagctgatattactctcacgactatcaatgtcacactcgcaccaaattacctgactcaaatatctctccccgatagtgatacatcctacatttcactctctcctgttgcatcgctatcgatgcaaagccactttcatcagaggctccaagatgaaaatcggcatagcgcgataacgcggtttagccgaactaccaacatgggggtcactgcgatgacatgtggcggcgcatttagaatgttaaagtctggcgctaagttttccagcccccctcatcaccgattaaacagtaaacgaagttggttgacgtcagagcatgttcagtcattaaaacagtaccagcgcctcaacaaaagcctcatacctgaaaactctcggattgcactccgtagaaaatacaaaatcgagcttcaaaatatggtcagatcttggtttgcaatgcaagaccatacccttgattcgaacatacttatccaacatttgaatcatgacctatcttacttaggagccacaaaacgttttgcatacgatccagcgatgaccaagctctttactgagcttttgaaacgagagttatcaaattcaatcaataatggtgagcaacacactaatggatcgtttttagtcctaccgaatatcagggtttgtggcgcaacagctttaagctccccggtaacggtggggattccatcacttacagctttctttggcttcgttcacgcatttgaacggaatataaatcgcaccacctcatcgtttcgtgttgaatcctttgcgatatgcgtccatcaactacatgtcgagaagcgaggtttgacagcagagtttgtggaaaaaggcgacgggactatatccgctcccgcgacccgggatgactggcagtgtgatgtcgtatttagccttattttgaacaccaactttgctcaacatattgaccaagatacgttagttacatcactaccaaagcgattggctcggggttcagcaaaaattgcgattgatgactttaaacatatcaactcattctcgacattagaaacagcgatcgaatctctgccaatagaagctggtaggtggttatcactttacgcacagtcaaacaataatctaagtgatctattagcagccatgacagaggaccatcagctcatggcaagctgcgtcggttaccacttgttagaagagcccaaagataaaccaaactccctcagaggttacaaacacgctatcgccgagtgcatcattggactcattaactcaatcacctttagctcagagactgatcccaacacaatcttttggtcgctaaagaactatcaaaactacctagtggtacagccaaggagtatcaacgatgaaactaccgacaaatctagcctatgagcgctctatcgacccatcagatgtctgtttttttgtcgtctggcccgatgatagaaaaacacctttaacctacaattctcgtactctgctcgggcaaatggaagcggcatcattagcctatgatgtctcaggtcaaccaataaaaagtgccaccgctgaggcgttagctcaagggaaccctcatcaagttgatttctgccacgttccatacggtgcgagtcatattgaatgcagtttctccgtctcgttttcttctgaactacgtcaaccatataagtgtaactcaagcaaagttaaacaaacgctagtgcaattagtcgagctctacgaaacgaaaatcggctggactgagctagcaacccgatatttgatgaacatttgcaacggtaaatggctgtggaaaaatacccgtaaagcctattgctggaacattgtacttacaccttggccttggaacggggaaaaggttggatttgaagatattcgtactaactacacctcacggcaagactttaaaaataataaaaattggtctgctatagttgaaatgatcaaaaccgcattttctagtactgatgggctggcgatatttgaagtcagggccaccttgcacttgccaacgaatgctatggtgcggccaagccaagttttcacagaaaaagaaagtggcagtaaaagtaaatctaaaactcaaaacagtcgagtttttcagagtacaactattgatggtgaacgatcgccaatactaggggcctttaaaacgggagcagctattgcaaccattgacgactggtatcctgaagccactgagccactaagggtcggacggtttggggttcatcgcgaagatgtcacttgctaccgtcatccgtctaccggaaaagattttttctcgatattacaacaagcagagcactatattgaagtgttgagcgccaacaaaactcccgctcaagaaactatcaacgacatgcactttttaatggctaacctgattaagggtgggatgttccagcataaaggagactgactgtgaaatggtattataagacaatcacctttctgccagagttgtgcaacaacgagtcactggctgcaaagtgtctccgcgttctgcatggatttaactatcagtatgagacacgaaatatcggcgtttcatttccgctttggtgtgatgcaacggttggaaaaaagatttcatttgtcagcaagaacaagatagaactcgacttactacttaaacaacactatttcgtccaaatggaacaacttcaatactttcatatatccaacactgttctcgtcccagaagattgtacatacgtttcctttagacgctgtcaatctatagataagctcacagcagcagggctggcaaggaaaatcagacgcctggagaaacgtgctctatctagaggcgagcaatttgacccatcatcttttgctcaaaaagagcatactgcaatagcgcactaccactcacttggggagtccagcaaacagacgaaccgcaactttcgactcaatatcaggatgctctcggagcaaccccgtgaggggaactcgatttttagtagctatggcttatcaaattcagaaaactcgtttcagcctgtacccttaatctgacctttaataaggagatataccatggcgacaagtttacctacgccctcagcaattacgacttcggcgttagagtatgcattccatactcccgctcgcaatctaacgaaatctcgcggaaaaaacattcatcgttatgtcagtgtaaagatgagtaagaggattacggtagaatctactctagagtgtgatgcctgctatcactttgattttgagccaagtattgttcgcttttgcgctcaaccgattcgatttttatattatctcaatggtcagtctcactcctatgttcctgactttctagttcaatttgataccaacgagtttgttctatatgaagtaaagtcagcttatgctaagaacaaacctgattttgatgttgaatgggaggcgaaagtaaaagcagcaactgaactagggctagaattggagcttgttgaagagagtgatattagggatacggttgtattaaataatcttaagcgcatgcatcgttatgcttcgaaagatgagctgaataacgtacataactctctcttaaaaataataaagtacaatggcgcccaatctgcaagatgcttgggagaacagttgggtttaaaaggccgaactgttttaccaattttgtgcgatttgctgtcaaggtgtttactcgatacacgtttggataagcctctatctcttgaatctcgatttgagttggccagttatggctaagaaagggttctcaagtttccatagaaaagcagtctcttcccaagatacgcttgaatcgatagagcttgtctctagcgctaattgtctagaaagtgttacgtatcaagatatatcagcatttcccgaaacaattgcggtagagattaatttccgattaagcattcttcgctttttagcgcgaaagtgcgaaaccattgtggccaaatcaattgaaccacatcgtgtagagctacagcaaaactatagtagaaaaatacccagtgcaataacgatatatcgatggtggcttgcttttcgaaaatcagactacaaccccattagcttagcacctaatatcaaggatagaggtaatagagagacaaaagtgtcaacagttgttgattctattatggaacaggcagttgaaagagttatatctggacgaaaagtcaatgttagctctgcatataaacgtgttcgacgaaaagttcgtcaatacaatctaactcatggaacgaaatacacgtatcctaagtacgaatctgtaagaaagcgagtaaaaaagaaaaccccatttgagttattagccgcagggaaaggggagagagtagctaagagagagtttcgccgaatgggaaaaaagatcctcacgtctagcgtgctagagagggttgaaatagatcacactgtcgttgacctttttgcagtacacgaagagtatcgaatcccattgggccgaccttggcttactcaattggttgattgttacagtaaagctgtaatcggtttttatttaggtttcgagcctcctagctatgtgtcggtttcccttgcacttaagaatgcaatacaacgcaaagatgacttaatctcctcgtatgaatcgatcgagaatgaatggctatgttatggcatcccagacctactcgtaactgataatggtaaagagtttttgtcgaaagcatttgatcaagcatgtgaatcactattgatcaatgtgcatcaaaataaagttgagacgcccgacaacaaacctcatgttgaacgtaactacgggactattaatacttctctgttagacgatttacctgggaaatccttcagccagtaccttcaaagagaagggtacgactctgtgggagaagctacccttacactcaatgagattagagaaatttacttaatttggttggtggatatttatcataaaaaacccaatcagagaggcactaattgtcctaatgttgcgtggaaaaagggttgtcaagaatgggaaccagaggagttctctggttctaaagacgaattagactttaaatttgctattgttgattacaaacaacttactaaagtagggataactgtctacaaagaactgagttatagcaatgaccgtttagctgaatatagagggaagaaaggaaaccataaagttcagttcaagtataaccctgagtgtatggcagttatttgggtgttggatgaggatatgaatgagtactttacagttaatgcgattgactacgaatatgcaagtagagtatcactttggcaacataaatataacatgaaatatcaagcagaactaaattcagcagaatatgatgaggacaaggaaattgatgcagaaataaaaattgaagaaatcgcagatcgttcaattgttaagactaacaaaatcagagctcggaggcgtggcgctaggcatcaagagaatagcgcaagggctaagtcaatcagtaatgcgaacccggcctcgatacaaaaacatgaagatgaaatcgttagtgcagataatgacgattgggatattgattatgtctgagaaatcgtcaaatgagtgaaacgcgtgaggctcgtatatcaagagctaaaagggcatttgtatccacaccgagcgttaggaaaatcttgagttacatggatagatgtagagatctatcagacctagagtctgagcctacatgcatgatggtctatggtgcttcgggtgtaggtaaaacgaccgtcatcaagaaatacttaaatcaaaacagaagagagtccgaagccgggggcgatataataccggttttgcatattgagttgccagacaatgcgaagccagtagatgcagcaagggaattgctggttgaaatgggtgacccgctagcactttatgaaactgacttagctagattgacgaaaagactgactgaattaatccctgcggtcggcgtgaagctgattattatcgatgagttccaacatttggtggaagaaaggtcaaatcgggttcttacccaagtaggtaattggctaaaaatgatacttaacaaaacgaaatgtccaattgttatatttggtatgccatactcaaaagttgtactgcaagcaaactcgcaacttcacgggcgattttccattcaggttgaactgcgcccctttagctaccagggaggtagaggtgtatttaaaacttttttggaataccttgataaagccctaccttttgaaaaacaggctggcttagccaacgaaagtttgcagaaaaaattgtatgcattctctcagggaaacatgcgttcgttgagaaaccttatttatcaagcatctatcgaagcaattgataatcagcatgagacgataaccgaagaagatttcgtttttgcatcgaagttgacatcgggcgataaacccaactcatggaaaaatccttttgaggagggtgttgaggtaacagaagatatgttacgaccgccaccaaaagatattggttgggaggactatttgagacattcaaccccgagagtgagtaaaccaggtagaaataaaaactttttcgaataacctaggctgctgcgctgctgccaccgctgagcaataactagcataaccccttggggcctctaaacgggtcttgaggggttttttgctgaaacctcaggcatttgttgttgatacaaccataaaatgataattacacccataaattgataattatcacacccataaattgatattgcctcttcatggtctaaacttcagtaagtttacgacattttcctcgaggtcatttccggggatccatggagaaaaaaatcactggatataccaccgttgatatatcccaatggcatcgtaaagaacattttgaggcatttcagtcagttgctcaatgtacctataaccagaccgttcagctggatattacggcctttttaaagaccgtaaagaaaaataagcacaagttttatccggcctttattcacattcttgcccgcctgatgaatgctcatccggagttccgtatggcaatgaaagacggtgagctggtgatatgggatagtgttcacccttgttacaccgttttccatgagcaaactgaaacgttttcatcgctctggagtgaataccacgacgatttccggcagtttctacacatatattcgcaagatgtggcgtgttacggtgaaaacctggcctatttccctaaagggtttattgagaatatgtttttcgtctcagccaatccctgggtgagtttcaccagttttgatttaaacgtggccaatatggacaacttcttcgcccccgttttcactatgggcaaatattatacgcaaggcgacaaggtgctgatgccgctggcgattcaggttcatcatgccgtttgtgatggcttccatgtcggcagaatgcttaatgaattacaacagtactgcgatgagtggcagggcggggcgtaatttttttaaggcagttattggtgcccttctagagtccttactgcagtagttttgctgaaatactcgattcacaaaaatatcaacttatggttgttttgtgagatatcaatatatggttgttttgtggttaagttgctgattataaataattattaaatatcactttatggttgcatcaacaggtaccgagctcgaattcactggccgtcgttttacaacgtcgtgactgggaaaaccctggcgttacccaacttaatcgccttgctatcgtggccggatcttgcggcccctcggcttgaacgaattgttagacattatttgccgactaccttggtgatctcgcctttcacgtagtggacaaattcttccaactgatctgcgcgcgaggccaagcgatcttcttcttgtccaagataagcctgtctagcttcaagtatgacgggctgatactgggccggcaggcgctccattgcccagtcggcagcgacatccttcggcgcgattttgccggttactgcgctgtaccaaatgcgggacaacgtaagcactacatttcgctcatcgccagcccagtcgggcggcgagttccatagcgttaaggtttcatttagcgcctcaaatagatcctgttcaggaaccggatcaaagagttcctccgccgctggacctaccaaggcaacgctatgttctcttgcttttgtcagcaagatagccagatcaatgtcgatcgtggctggctcgaagatacctgcaagaatgtcattgcgctgccattctccaaattgcagttcgcgcttagctggataacgccacggaatgatgtcgtcgtgcacaacaatggtgacttctacagcgcggagaatctcgctctctccaggggaagccgaagtttccaaaaggtcgttgatcaaagctcgccgcgttgtttcatcaagccttacggtcaccgtaaccagcaaatcaatatcactgtgtggcttcaggccgccatccactgcggagccgtacaaatgtacggccagcaacgtcggttcgagatggcgctcgatgacgccaactacctctgatagttgagtcgatacttcggcgatcaccgcttccctcatactcttcctttttcaatattattgaagcatttatcagggttattgtctcatgagcggatacatatttgaatgtatttagaaaaataaacaaatagctagctcactcggtcgctacgctccgggcgtgagactgcggcgggcgctgcggacacatacaaagttacccacagattccgtggataagcaggggactaacatgtgaggcaaaacagcagggccgcgccggtggcgtttttccataggctccgccctcctgccagagttcacataaacagacgcttttccggtgcatctgtgggagccgtgaggctcaaccatgaatctgacagtacgggcgaaacccgacaggacttaaagatccccaccgtttccggcgggtcgctccctcttgcgctctcctgttccgaccctgccgtttaccggatacctgttccgcctttctcccttacgggaagtgtggcgctttctcatagctcacacactggtatctcggctcggtgtaggtcgttcgctccaagctgggctgtaagcaagaactccccgttcagcccgactgctgcgccttatccggtaactgttcacttgagtccaacccggaaaagcacggtaaaacgccactggcagcagccattggtaactgggagttcgcagaggatttgtttagctaaacacgcggttgctcttgaagtgtgcgccaaagtccggctacactggaaggacagatttggttgctgtgctctgcgaaagccagttaccacggttaagcagttccccaactgacttaaccttcgatcaaaccacctccccaggtggttttttcgtttacagggcaaaagattacgcgcagaaaaaaaggatctcaagaagatcctttgatcttttctactgaaccgctctagatttcagtgcaatttatctcttcaaatgtagcacctgaagtcagccccatacgatataagttgtaattctcatgttagtcatgccccgcgcccaccggaaggagctgactgggttgaaggctctcaagggcatcggtcgagatcccggtgcctaatgagtgagctaacttacattaattgcgttgcgctcactgcccgctttccagtcgggaaacctgtcgtgccagctgcattaatgaatcggccaacgcgcggggagaggcggtttgcgtattgggcgccagggtggtttttcttttcaccagtgagacgggcaacagctgattgcccttcaccgcctggccctgagagagttgcagcaagcggtccacgctggtttgccccagcaggcgaaaatcctgtttgatggtggttaacggcgggatataacatgagctgtcttcggtatcgtcgtatcccactaccgagatgtccgcaccaacgcgcagcccggactcggtaatggcgcgcattgcgcccagcgccatctgatcgttggcaaccagcatcgcagtgggaacgatgccctcattcagcatttgcatggtttgttgaaaaccggacatggcactccagtcgccttcccgttccgctatcggctgaatttgattgcgagtgagatatttatgccagccagccagacgcagacgcgccgagacagaacttaatgggcccgctaacagcgcgatttgctggtgacccaatgcgaccagatgctccacgcccagtcgcgtaccgtcttcatgggagaaaataatactgttgatgggtgtctggtcagagacatcaagaaataacgccggaacattagtgcaggcagcttccacagcaatggcatcctggtcatccagcggatagttaatgatcagcccactgacgcgttgcgcgagaagattgtgcaccgccgctttacaggcttcgacgccgcttcgttctaccatcgacaccaccacgctggcacccagttgatcggcgcgagatttaatcgccgcgacaatttgcgacggcgcgtgcagggccagactggaggtggcaacgccaatcagcaacgactgtttgcccgccagttgttgtgccacgcggttgggaatgtaattcagctccgccatcgccgcttccactttttcccgcgttttcgcaga

SEQ ID NO: 74 - DNA, 12994 bp, artificial sequence
  Synthetic
aacgtggctggcctggttcaccacgcgggaaacggtctgataagagacaccggcatactctgcgacatcgtataacgttactggtttcacattcaccaccctgaattgactctcttccgggcgctatcatgccataccgcgaaaggttttgcgccattcgatggtgtccgggatctcgacgctctcccttatgcgactcctgcattaggaatggataaccgtattaccgcctttgagtgagctgataccgctcgccgcagccgaactaccgagcgcagcgagtcagtgagcgaggagcgactcctgcattaggaaattaatacgactcactataggggaattgtgagcggataacaattcccctgtagaaataattttgtttaactttaataaggagatataccatgggtgaactgccgagtaggtagctgataacgcattactaagctggcgcgtgaagctgtagaagtgaactgccgagtaggtagctgataactgggaggattcataaagcattgtttgttggctgtgaactgccgagtaggtagctgataacagtacagcgcggctgaaatcatcattaaagcggtgaactgccgagtaggtagctgataacggatccgaattcgagcgaaggagatatacatatgtttttgcaaagacctaaaccttacagcgatgaaagtttagaaagtttctttatccgagtggctaacaaaaatggctacggtgatgtccatcgcttcctagaagccactaaacgattccttcaagacattgaccataatggctatcaaacctttccgactgatataactcggataaacccatactcagctaaaaacagttccagcgcacgaactgcgtcattcctgaaacttgcacaattgacatttaatgaaccgccagagctacttgggttggcaattaacagaacaaacatgaaatactcgccgtcaactagcgcggttgttagaggtgcagaagtctttcctcgcagtttactacggacgcactccatcccctgctgtcctttgtgtctgcgagaaaatggctacgcctcctacctttggcactttcaggggtacgaatactgccacagccataacgtacctttaattaccacttgtagctgtggtaaggagtttgactaccgagtatctgggttaaagggcatttgctgcaaatgcaaggagcctatcaccttaaccagcagggagaacggtcatgaggcagcgtgtactgtttcaaactggcttgctggccatgaatctaaacctctgccaaatcttcctaaaagctaccgatggggtttagttcattggtggatgggtattaaagatagcgagttcgatcacttttcgttcgttcaatttttctcaaactggccaaggtcattccactcgataatcgaagatgaagtagagttcaaccttgagcatgctgttgtcagcacgtctgaattacgactaaaagatcttcttggtcgattgtttttcggttcaattcggttacctgagcggaatcttcaacacaatatcatccttggtgagcttctctgctatttagaaaatcgtttatggcaagacaagggattaatcgccaacctcaaaatgaacgcgttagaggcgactgtaatgttaaattgtagcctcgatcagattgcatcaatggttgaacaacgcatcttgaagccaaatcgaaaaagcaagcccaacagccctcttgatgttaccgattatctatttcatttcggcgatattttctgtctttggttagctgagttccaaagcgatgagtttaaccgttcgttttatgtgtcgaggtggtaaatgcaaactctgaaagaactaatcgcatccaatcctgacgacttaacaactgaacttaagagagcatttcgtccactcacaccgcatattgcaattgatggtaatgaacttgacgcactgacgatattagtcaatttaaccgataagactgatgatcagaaagacctgctcgatcgagccaaatgcaagcaaaaacttcgagatgaaaaatggtgggctagctgcataaattgcgttaattacagacaaagccataacccaaaattcccggatatacgttctgaaggcgtgattcgaacccaagccctgggtgaattaccgagtttcctactctcgtcctcaaaaatcccaccataccattggtcatatagccatgattcaaaatacgtcaacaaaagcgcattcctcaccaatgagttttgttgggatggtgagatctcatgtttgggtgagcttcttaaagatgcagatcacccactttggaatactttgaaaaagttaggttgttctcaaaaaacttgcaaagcaatggcaaaacaactagctgatattactctcacgactatcaatgtcacactcgcaccaaattacctgactcaaatatctctccccgatagtgatacatcctacatttcactctctcctgttgcatcgctatcgatgcaaagccactttcatcagaggctccaagatgaaaatcggcatagcgcgataacgcggtttagccgaactaccaacatgggggtcactgcgatgacatgtggcggcgcatttagaatgttaaagtctggcgctaagttttccagcccccctcatcaccgattaaacagtaaacgaagttggttgacgtcagagcatgttcagtcattaaaacagtaccagcgcctcaacaaaagcctcatacctgaaaactctcggattgcactccgtagaaaatacaaaatcgagcttcaaaatatggtcagatcttggtttgcaatgcaagaccatacccttgattcgaacatacttatccaacatttgaatcatgacctatcttacttaggagccacaaaacgttttgcatacgatccagcgatgaccaagctctttactgagcttttgaaacgagagttatcaaattcaatcaataatggtgagcaacacactaatggatcgtttttagtcctaccgaatatcagggtttgtggcgcaacagctttaagctccccggtaacggtggggattccatcacttacagctttctttggcttcgttcacgcatttgaacggaatataaatcgcaccacctcatcgtttcgtgttgaatcctttgcgatatgcgtccatcaactacatgtcgagaagcgaggtttgacagcagagtttgtggaaaaaggcgacgggactatatccgctcccgcgacccgggatgactggcagtgtgatgtcgtatttagccttattttgaacaccaactttgctcaacatattgaccaagatacgttagttacatcactaccaaagcgattggctcggggttcagcaaaaattgcgattgatgactttaaacatatcaactcattctcgacattagaaacagcgatcgaatctctgccaatagaagctggtaggtggttatcactttacgcacagtcaaacaataatctaagtgatctattagcagccatgacagaggaccatcagctcatggcaagctgcgtcggttaccacttgttagaagagcccaaagataaaccaaactccctcagaggttacaaacacgctatcgccgagtgcatcattggactcattaactcaatcacctttagctcagagactgatcccaacacaatcttttggtcgctaaagaactatcaaaactacctagtggtacagccaaggagtatcaacgatgaaactaccgacaaatctagcctatgagcgctctatcgacccatcagatgtctgtttttttgtcgtctggcccgatgatagaaaaacacctttaacctacaattctcgtactctgctcgggcaaatggaagcggcatcattagcctatgatgtctcaggtcaaccaataaaaagtgccaccgctgaggcgttagctcaagggaaccctcatcaagttgatttctgccacgttccatacggtgcgagtcatattgaatgcagtttctccgtctcgttttcttctgaactacgtcaaccatataagtgtaactcaagcaaagttaaacaaacgctagtgcaattagtcgagctctacgaaacgaaaatcggctggactgagctagcaacccgatatttgatgaacatttgcaacggtaaatggctgtggaaaaatacccgtaaagcctattgctggaacattgtacttacaccttggccttggaacggggaaaaggttggatttgaagatattcgtactaactacacctcacggcaagactttaaaaataataaaaattggtctgctatagttgaaatgatcaaaaccgcattttctagtactgatgggctggcgatatttgaagtcagggccaccttgcacttgccaacgaatgctatggtgcggccaagccaagttttcacagaaaaagaaagtggcagtaaaagtaaatctaaaactcaaaacagtcgagtttttcagagtacaactattgatggtgaacgatcgccaatactaggggcctttaaaacgggagcagctattgcaaccattgacgactggtatcctgaagccactgagccactaagggtcggacggtttggggttcatcgcgaagatgtcacttgctaccgtcatccgtctaccggaaaagattttttctcgatattacaacaagcagagcactatattgaagtgttgagcgccaacaaaactcccgctcaagaaactatcaacgacatgcactttttaatggctaacctgattaagggtgggatgttccagcataaaggagactgactgtgaaatggtattataagacaatcacctttctgccagagttgtgcaacaacgagtcactggctgcaaagtgtctccgcgttctgcatggatttaactatcagtatgagacacgaaatatcggcgtttcatttccgctttggtgtgatgcaacggttggaaaaaagatttcatttgtcagcaagaacaagatagaactcgacttactacttaaacaacactatttcgtccaaatggaacaacttcaatactttcatatatccaacactgttctcgtcccagaagattgtacatacgtttcctttagacgctgtcaatctatagataagctcacagcagcagggctggcaaggaaaatcagacgcctggagaaacgtgctctatctagaggcgagcaatttgacccatcatcttttgctcaaaaagagcatactgcaatagcgcactaccactcacttggggagtccagcaaacagacgaaccgcaactttcgactcaatatcaggatgctctcggagcaaccccgtgaggggaactcgatttttagtagctatggcttatcaaattcagaaaactcgtttcagcctgtacccttaatctgacctttaataaggagatataccatggcgacaagtttacctacgccctcagcaattacgacttcggcgttagagtatgcattccatactcccgctcgcaatctaacgaaatctcgcggaaaaaacattcatcgttatgtcagtgtaaagatgagtaagaggattacggtagaatctactctagagtgtgatgcctgctatcactttgattttgagccaagtattgttcgcttttgcgctcaaccgattcgatttttatattatctcaatggtcagtctcactcctatgttcctgactttctagttcaatttgataccaacgagtttgttctatatgaagtaaagtcagcttatgctaagaacaaacctgattttgatgttgaatgggaggcgaaagtaaaagcagcaactgaactagggctagaattggagcttgttgaagagagtgatattagggatacggttgtattaaataatcttaagcgcatgcatcgttatgcttcgaaagatgagctgaataacgtacataactctctcttaaaaataataaagtacaatggcgcccaatctgcaagatgcttgggagaacagttgggtttaaaaggccgaactgttttaccaattttgtgcgatttgctgtcaaggtgtttactcgatacacgtttggataagcctctatctcttgaatctcgatttgagttggccagttatggctaagaaagggttctcaagtttccatagaaaagcagtctcttcccaagatacgcttgaatcgatagagcttgtctctagcgctaattgtctagaaagtgttacgtatcaagatatatcagcatttcccgaaacaattgcggtagagattaatttccgattaagcattcttcgctttttagcgcgaaagtgcgaaaccattgtggccaaatcaattgaaccacatcgtgtagagctacagcaaaactatagtagaaaaatacccagtgcaataacgatatatcgatggtggcttgcttttcgaaaatcagactacaaccccattagcttagcacctaatatcaaggatagaggtaatagagagacaaaagtgtcaacagttgttgattctattatggaacaggcagttgaaagagttatatctggacgaaaagtcaatgttagctctgcatataaacgtgttcgacgaaaagttcgtcaatacaatctaactcatggaacgaaatacacgtatcctaagtacgaatctgtaagaaagcgagtaaaaaagaaaaccccatttgagttattagccgcagggaaaggggagagagtagctaagagagagtttcgccgaatgggaaaaaagatcctcacgtctagcgtgctagagagggttgaaatagatcacactgtcgttgacctttttgcagtacacgaagagtatcgaatcccattgggccgaccttggcttactcaattggttgattgttacagtaaagctgtaatcggtttttatttaggtttcgagcctcctagctatgtgtcggtttcccttgcacttaagaatgcaatacaacgcaaagatgacttaatctcctcgtatgaatcgatcgagaatgaatggctatgttatggcatcccagacctactcgtaactgataatggtaaagagtttttgtcgaaagcatttgatcaagcatgtgaatcactattgatcaatgtgcatcaaaataaagttgagacgcccgacaacaaacctcatgttgaacgtaactacgggactattaatacttctctgttagacgatttacctgggaaatccttcagccagtaccttcaaagagaagggtacgactctgtgggagaagctacccttacactcaatgagattagagaaatttacttaatttggttggtggatatttatcataaaaaacccaatcagagaggcactaattgtcctaatgttgcgtggaaaaagggttgtcaagaatgggaaccagaggagttctctggttctaaagacgaattagactttaaatttgctattgttgattacaaacaacttactaaagtagggataactgtctacaaagaactgagttatagcaatgaccgtttagctgaatatagagggaagaaaggaaaccataaagttcagttcaagtataaccctgagtgtatggcagttatttgggtgttggatgaggatatgaatgagtactttacagttaatgcgattgactacgaatatgcaagtagagtatcactttggcaacataaatataacatgaaatatcaagcagaactaaattcagcagaatatgatgaggacaaggaaattgatgcagaaataaaaattgaagaaatcgcagatcgttcaattgttaagactaacaaaatcagagctcggaggcgtggcgctaggcatcaagagaatagcgcaagggctaagtcaatcagtaatgcgaacccggcctcgatacaaaaacatgaagatgaaatcgttagtgcagataatgacgattgggatattgattatgtctgagaaatcgtcaaatgagtgaaacgcgtgaggctcgtatatcaagagctaaaagggcatttgtatccacaccgagcgttaggaaaatcttgagttacatggatagatgtagagatctatcagacctagagtctgagcctacatgcatgatggtctatggtgcttcgggtgtaggtaaaacgaccgtcatcaagaaatacttaaatcaaaacagaagagagtccgaagccgggggcgatataataccggttttgcatattgagttgccagacaatgcgaagccagtagatgcagcaagggaattgctggttgaaatgggtgacccgctagcactttatgaaactgacttagctagattgacgaaaagactgactgaattaatccctgcggtcggcgtgaagctgattattatcgatgagttccaacatttggtggaagaaaggtcaaatcgggttcttacccaagtaggtaattggctaaaaatgatacttaacaaaacgaaatgtccaattgttatatttggtatgccatactcaaaagttgtactgcaagcaaactcgcaacttcacgggcgattttccattcaggttgaactgcgcccctttagctaccagggaggtagaggtgtatttaaaacttttttggaataccttgataaagccctaccttttgaaaaacaggctggcttagccaacgaaagtttgcagaaaaaattgtatgcattctctcagggaaacatgcgttcgttgagaaaccttatttatcaagcatctatcgaagcaattgataatcagcatgagacgataaccgaagaagatttcgtttttgcatcgaagttgacatcgggcgataaacccaactcatggaaaaatccttttgaggagggtgttgaggtaacagaagatatgttacgaccgccaccaaaagatattggttgggaggactatttgagacattcaaccccgagagtgagtaaaccaggtagaaataaaaactttttcgaataacctaggctgctgcgctgctgccaccgctgagcaataactagcataaccccttggggcctctaaacgggtcttgaggggttttttgctgaaacctcaggcatttgttgttgatacaaccataaaatgataattacacccataaattgataattatcacacccataaattgatattgcctcttcatggtctaaacttcagtaagtttacgacattttcctcgaggtcatttccggggatccatggagaaaaaaatcactggatataccaccgttgatatatcccaatggcatcgtaaagaacattttgaggcatttcagtcagttgctcaatgtacctataaccagaccgttcagctggatattacggcctttttaaagaccgtaaagaaaaataagcacaagttttatccggcctttattcacattcttgcccgcctgatgaatgctcatccggagttccgtatggcaatgaaagacggtgagctggtgatatgggatagtgttcacccttgttacaccgttttccatgagcaaactgaaacgttttcatcgctctggagtgaataccacgacgatttccggcagtttctacacatatattcgcaagatgtggcgtgttacggtgaaaacctggcctatttccctaaagggtttattgagaatatgtttttcgtctcagccaatccctgggtgagtttcaccagttttgatttaaacgtggccaatatggacaacttcttcgcccccgttttcactatgggcaaatattatacgcaaggcgacaaggtgctgatgccgctggcgattcaggttcatcatgccgtttgtgatggcttccatgtcggcagaatgcttaatgaattacaacagtactgcgatgagtggcagggcggggcgtaatttttttaaggcagttattggtgcccttctagagtccttactgcagtagttttgctgaaatactcgattcacaaaaatatcaacttatggttgttttgtgagatatcaatatatggttgttttgtggttaagttgctgattataaataattattaaatatcactttatggttgcatcaacaggtaccgagctcgaattcactggccgtcgttttacaacgtcgtgactgggaaaaccctggcgttacccaacttaatcgccttgctatcgtggccggatcttgcggcccctcggcttgaacgaattgttagacattatttgccgactaccttggtgatctcgcctttcacgtagtggacaaattcttccaactgatctgcgcgcgaggccaagcgatcttcttcttgtccaagataagcctgtctagcttcaagtatgacgggctgatactgggccggcaggcgctccattgcccagtcggcagcgacatccttcggcgcgattttgccggttactgcgctgtaccaaatgcgggacaacgtaagcactacatttcgctcatcgccagcccagtcgggcggcgagttccatagcgttaaggtttcatttagcgcctcaaatagatcctgttcaggaaccggatcaaagagttcctccgccgctggacctaccaaggcaacgctatgttctcttgcttttgtcagcaagatagccagatcaatgtcgatcgtggctggctcgaagatacctgcaagaatgtcattgcgctgccattctccaaattgcagttcgcgcttagctggataacgccacggaatgatgtcgtcgtgcacaacaatggtgacttctacagcgcggagaatctcgctctctccaggggaagccgaagtttccaaaaggtcgttgatcaaagctcgccgcgttgtttcatcaagccttacggtcaccgtaaccagcaaatcaatatcactgtgtggcttcaggccgccatccactgcggagccgtacaaatgtacggccagcaacgtcggttcgagatggcgctcgatgacgccaactacctctgatagttgagtcgatacttcggcgatcaccgcttccctcatactcttcctttttcaatattattgaagcatttatcagggttattgtctcatgagcggatacatatttgaatgtatttagaaaaataaacaaatagctagctcactcggtcgctacgctccgggcgtgagactgcggcgggcgctgcggacacatacaaagttacccacagattccgtggataagcaggggactaacatgtgaggcaaaacagcagggccgcgccggtggcgtttttccataggctccgccctcctgccagagttcacataaacagacgcttttccggtgcatctgtgggagccgtgaggctcaaccatgaatctgacagtacgggcgaaacccgacaggacttaaagatccccaccgtttccggcgggtcgctccctcttgcgctctcctgttccgaccctgccgtttaccggatacctgttccgcctttctcccttacgggaagtgtggcgctttctcatagctcacacactggtatctcggctcggtgtaggtcgttcgctccaagctgggctgtaagcaagaactccccgttcagcccgactgctgcgccttatccggtaactgttcacttgagtccaacccggaaaagcacggtaaaacgccactggcagcagccattggtaactgggagttcgcagaggatttgtttagctaaacacgcggttgctcttgaagtgtgcgccaaagtccggctacactggaaggacagatttggttgctgtgctctgcgaaagccagttaccacggttaagcagttccccaactgacttaaccttcgatcaaaccacctccccaggtggttttttcgtttacagggcaaaagattacgcgcagaaaaaaaggatctcaagaagatcctttgatcttttctactgaaccgctctagatttcagtgcaatttatctcttcaaatgtagcacctgaagtcagccccatacgatataagttgtaattctcatgttagtcatgccccgcgcccaccggaaggagctgactgggttgaaggctctcaagggcatcggtcgagatcccggtgcctaatgagtgagctaacttacattaattgcgttgcgctcactgcccgctttccagtcgggaaacctgtcgtgccagctgcattaatgaatcggccaacgcgcggggagaggcggtttgcgtattgggcgccagggtggtttttcttttcaccagtgagacgggcaacagctgattgcccttcaccgcctggccctgagagagttgcagcaagcggtccacgctggtttgccccagcaggcgaaaatcctgtttgatggtggttaacggcgggatataacatgagctgtcttcggtatcgtcgtatcccactaccgagatgtccgcaccaacgcgcagcccggactcggtaatggcgcgcattgcgcccagcgccatctgatcgttggcaaccagcatcgcagtgggaacgatgccctcattcagcatttgcatggtttgttgaaaaccggacatggcactccagtcgccttcccgttccgctatcggctgaatttgattgcgagtgagatatttatgccagccagccagacgcagacgcgccgagacagaacttaatgggcccgctaacagcgcgatttgctggtgacccaatgcgaccagatgctccacgcccagtcgcgtaccgtcttcatgggagaaaataatactgttgatgggtgtctggtcagagacatcaagaaataacgccggaacattagtgcaggcagcttccacagcaatggcatcctggtcatccagcggatagttaatgatcagcccactgacgcgttgcgcgagaagattgtgcaccgccgctttacaggcttcgacgccgcttcgttctaccatcgacaccaccacgctggcacccagttgatcggcgcgagatttaatcgccgcgacaatttgcgacggcgcgtgcagggccagactggaggtggcaacgccaatcagcaacgactgtttgcccgccagttgttgtgccacgcggttgggaatgtaattcagctccgccatcgccgcttccactttttcccgcgttttcgcaga

SEQ ID NO: 75 - DNA, 12874 bp, artificial sequence
  Synthetic
aacgtggctggcctggttcaccacgcgggaaacggtctgataagagacaccggcatactctgcgacatcgtataacgttactggtttcacattcaccaccctgaattgactctcttccgggcgctatcatgccataccgcgaaaggttttgcgccattcgatggtgtccgggatctcgacgctctcccttatgcgactcctgcattaggaatggataaccgtattaccgcctttgagtgagctgataccgctcgccgcagccgaactaccgagcgcagcgagtcagtgagcgaggagcgactcctgcattaggaaattaatacgactcactataggggaattgtgagcggataacaattcccctgtagaaataattttgtttaactttaataaggagatataccatgggtgaactgccgagtaggtagctgataacgcacgacctgccggaattcagcctgactgaaagtgaactgccgagtaggtagctgataacggatccgaattcgagcgaaggagatatacatatgtttttgcaaagacctaaaccttacagcgatgaaagtttagaaagtttctttatccgagtggctaacaaaaatggctacggtgatgtccatcgcttcctagaagccactaaacgattccttcaagacattgaccataatggctatcaaacctttccgactgatataactcggataaacccatactcagctaaaaacagttccagcgcacgaactgcgtcattcctgaaacttgcacaattgacatttaatgaaccgccagagctacttgggttggcaattaacagaacaaacatgaaatactcgccgtcaactagcgcggttgttagaggtgcagaagtctttcctcgcagtttactacggacgcactccatcccctgctgtcctttgtgtctgcgagaaaatggctacgcctcctacctttggcactttcaggggtacgaatactgccacagccataacgtacctttaattaccacttgtagctgtggtaaggagtttgactaccgagtatctgggttaaagggcatttgctgcaaatgcaaggagcctatcaccttaaccagcagggagaacggtcatgaggcagcgtgtactgtttcaaactggcttgctggccatgaatctaaacctctgccaaatcttcctaaaagctaccgatggggtttagttcattggtggatgggtattaaagatagcgagttcgatcacttttcgttcgttcaatttttctcaaactggccaaggtcattccactcgataatcgaagatgaagtagagttcaaccttgagcatgctgttgtcagcacgtctgaattacgactaaaagatcttcttggtcgattgtttttcggttcaattcggttacctgagcggaatcttcaacacaatatcatccttggtgagcttctctgctatttagaaaatcgtttatggcaagacaagggattaatcgccaacctcaaaatgaacgcgttagaggcgactgtaatgttaaattgtagcctcgatcagattgcatcaatggttgaacaacgcatcttgaagccaaatcgaaaaagcaagcccaacagccctcttgatgttaccgattatctatttcatttcggcgatattttctgtctttggttagctgagttccaaagcgatgagtttaaccgttcgttttatgtgtcgaggtggtaaatgcaaactctgaaagaactaatcgcatccaatcctgacgacttaacaactgaacttaagagagcatttcgtccactcacaccgcatattgcaattgatggtaatgaacttgacgcactgacgatattagtcaatttaaccgataagactgatgatcagaaagacctgctcgatcgagccaaatgcaagcaaaaacttcgagatgaaaaatggtgggctagctgcataaattgcgttaattacagacaaagccataacccaaaattcccggatatacgttctgaaggcgtgattcgaacccaagccctgggtgaattaccgagtttcctactctcgtcctcaaaaatcccaccataccattggtcatatagccatgattcaaaatacgtcaacaaaagcgcattcctcaccaatgagttttgttgggatggtgagatctcatgtttgggtgagcttcttaaagatgcagatcacccactttggaatactttgaaaaagttaggttgttctcaaaaaacttgcaaagcaatggcaaaacaactagctgatattactctcacgactatcaatgtcacactcgcaccaaattacctgactcaaatatctctccccgatagtgatacatcctacatttcactctctcctgttgcatcgctatcgatgcaaagccactttcatcagaggctccaagatgaaaatcggcatagcgcgataacgcggtttagccgaactaccaacatgggggtcactgcgatgacatgtggcggcgcatttagaatgttaaagtctggcgctaagttttccagcccccctcatcaccgattaaacagtaaacgaagttggttgacgtcagagcatgttcagtcattaaaacagtaccagcgcctcaacaaaagcctcatacctgaaaactctcggattgcactccgtagaaaatacaaaatcgagcttcaaaatatggtcagatcttggtttgcaatgcaagaccatacccttgattcgaacatacttatccaacatttgaatcatgacctatcttacttaggagccacaaaacgttttgcatacgatccagcgatgaccaagctctttactgagcttttgaaacgagagttatcaaattcaatcaataatggtgagcaacacactaatggatcgtttttagtcctaccgaatatcagggtttgtggcgcaacagctttaagctccccggtaacggtggggattccatcacttacagctttctttggcttcgttcacgcatttgaacggaatataaatcgcaccacctcatcgtttcgtgttgaatcctttgcgatatgcgtccatcaactacatgtcgagaagcgaggtttgacagcagagtttgtggaaaaaggcgacgggactatatccgctcccgcgacccgggatgactggcagtgtgatgtcgtatttagccttattttgaacaccaactttgctcaacatattgaccaagatacgttagttacatcactaccaaagcgattggctcggggttcagcaaaaattgcgattgatgactttaaacatatcaactcattctcgacattagaaacagcgatcgaatctctgccaatagaagctggtaggtggttatcactttacgcacagtcaaacaataatctaagtgatctattagcagccatgacagaggaccatcagctcatggcaagctgcgtcggttaccacttgttagaagagcccaaagataaaccaaactccctcagaggttacaaacacgctatcgccgagtgcatcattggactcattaactcaatcacctttagctcagagactgatcccaacacaatcttttggtcgctaaagaactatcaaaactacctagtggtacagccaaggagtatcaacgatgaaactaccgacaaatctagcctatgagcgctctatcgacccatcagatgtctgtttttttgtcgtctggcccgatgatagaaaaacacctttaacctacaattctcgtactctgctcgggcaaatggaagcggcatcattagcctatgatgtctcaggtcaaccaataaaaagtgccaccgctgaggcgttagctcaagggaaccctcatcaagttgatttctgccacgttccatacggtgcgagtcatattgaatgcagtttctccgtctcgttttcttctgaactacgtcaaccatataagtgtaactcaagcaaagttaaacaaacgctagtgcaattagtcgagctctacgaaacgaaaatcggctggactgagctagcaacccgatatttgatgaacatttgcaacggtaaatggctgtggaaaaatacccgtaaagcctattgctggaacattgtacttacaccttggccttggaacggggaaaaggttggatttgaagatattcgtactaactacacctcacggcaagactttaaaaataataaaaattggtctgctatagttgaaatgatcaaaaccgcattttctagtactgatgggctggcgatatttgaagtcagggccaccttgcacttgccaacgaatgctatggtgcggccaagccaagttttcacagaaaaagaaagtggcagtaaaagtaaatctaaaactcaaaacagtcgagtttttcagagtacaactattgatggtgaacgatcgccaatactaggggcctttaaaacgggagcagctattgcaaccattgacgactggtatcctgaagccactgagccactaagggtcggacggtttggggttcatcgcgaagatgtcacttgctaccgtcatccgtctaccggaaaagattttttctcgatattacaacaagcagagcactatattgaagtgttgagcgccaacaaaactcccgctcaagaaactatcaacgacatgcactttttaatggctaacctgattaagggtgggatgttccagcataaaggagactgactgtgaaatggtattataagacaatcacctttctgccagagttgtgcaacaacgagtcactggctgcaaagtgtctccgcgttctgcatggatttaactatcagtatgagacacgaaatatcggcgtttcatttccgctttggtgtgatgcaacggttggaaaaaagatttcatttgtcagcaagaacaagatagaactcgacttactacttaaacaacactatttcgtccaaatggaacaacttcaatactttcatatatccaacactgttctcgtcccagaagattgtacatacgtttcctttagacgctgtcaatctatagataagctcacagcagcagggctggcaaggaaaatcagacgcctggagaaacgtgctctatctagaggcgagcaatttgacccatcatcttttgctcaaaaagagcatactgcaatagcgcactaccactcacttggggagtccagcaaacagacgaaccgcaactttcgactcaatatcaggatgctctcggagcaaccccgtgaggggaactcgatttttagtagctatggcttatcaaattcagaaaactcgtttcagcctgtacccttaatctgacctttaataaggagatataccatggcgacaagtttacctacgccctcagcaattacgacttcggcgttagagtatgcattccatactcccgctcgcaatctaacgaaatctcgcggaaaaaacattcatcgttatgtcagtgtaaagatgagtaagaggattacggtagaatctactctagagtgtgatgcctgctatcactttgattttgagccaagtattgttcgcttttgcgctcaaccgattcgatttttatattatctcaatggtcagtctcactcctatgttcctgactttctagttcaatttgataccaacgagtttgttctatatgaagtaaagtcagcttatgctaagaacaaacctgattttgatgttgaatgggaggcgaaagtaaaagcagcaactgaactagggctagaattggagcttgttgaagagagtgatattagggatacggttgtattaaataatcttaagcgcatgcatcgttatgcttcgaaagatgagctgaataacgtacataactctctcttaaaaataataaagtacaatggcgcccaatctgcaagatgcttgggagaacagttgggtttaaaaggccgaactgttttaccaattttgtgcgatttgctgtcaaggtgtttactcgatacacgtttggataagcctctatctcttgaatctcgatttgagttggccagttatggctaagaaagggttctcaagtttccatagaaaagcagtctcttcccaagatacgcttgaatcgatagagcttgtctctagcgctaattgtctagaaagtgttacgtatcaagatatatcagcatttcccgaaacaattgcggtagagattaatttccgattaagcattcttcgctttttagcgcgaaagtgcgaaaccattgtggccaaatcaattgaaccacatcgtgtagagctacagcaaaactatagtagaaaaatacccagtgcaataacgatatatcgatggtggcttgcttttcgaaaatcagactacaaccccattagcttagcacctaatatcaaggatagaggtaatagagagacaaaagtgtcaacagttgttgattctattatggaacaggcagttgaaagagttatatctggacgaaaagtcaatgttagctctgcatataaacgtgttcgacgaaaagttcgtcaatacaatctaactcatggaacgaaatacacgtatcctaagtacgaatctgtaagaaagcgagtaaaaaagaaaaccccatttgagttattagccgcagggaaaggggagagagtagctaagagagagtttcgccgaatgggaaaaaagatcctcacgtctagcgtgctagagagggttgaaatagatcacactgtcgttgacctttttgcagtacacgaagagtatcgaatcccattgggccgaccttggcttactcaattggttgattgttacagtaaagctgtaatcggtttttatttaggtttcgagcctcctagctatgtgtcggtttcccttgcacttaagaatgcaatacaacgcaaagatgacttaatctcctcgtatgaatcgatcgagaatgaatggctatgttatggcatcccagacctactcgtaactgataatggtaaagagtttttgtcgaaagcatttgatcaagcatgtgaatcactattgatcaatgtgcatcaaaataaagttgagacgcccgacaacaaacctcatgttgaacgtaactacgggactattaatacttctctgttagacgatttacctgggaaatccttcagccagtaccttcaaagagaagggtacgactctgtgggagaagctacccttacactcaatgagattagagaaatttacttaatttggttggtggatatttatcataaaaaacccaatcagagaggcactaattgccctaatgttgcgtggaaaaagggttgtcaagaatgggaaccagaggagttctctggttctaaagacgaattagactttaaatttgctattgttgattacaaacaacttactaaagtagggataactgtctacaaagaactgagttatagcaatgaccgtttagctgaatatagagggaagaaaggaaaccataaagttcagttcaagtataaccctgagtgtatggcagttatttgggtgttggatgaggatatgaatgagtactttacagttaatgcgattgactacgaatatgcaagtagagtatcactttggcaacataaatataacatgaaatatcaagcagaactaaattcagcagaatatgatgaggacaaggaaattgatgcagaaataaaaattgaagaaatcgcagatcgttcaattgttaagactaacaaaatcagagctcggaggcgtggcgctaggcatcaagagaatagcgcaagggctaagtcaatcagtaatgcgaacccggcctcgatacaaaaacatgaagatgaaatcgttagtgcagataatgacgattgggatattgattatgtctgagaaatcgtcaaatgagtgaaacgcgtgaggctcgtatatcaagagctaaaagggcatttgtatccacaccgagcgttaggaaaatcttgagttacatggatagatgtagagatctatcagacctagagtctgagcctacatgcatgatggtctatggtgcttcgggtgtaggtaaaacgaccgtcatcaagaaatacttaaatcaaaacagaagagagtccgaagccgggggcgatataataccggttttgcatattgagttgccagacaatgcgaagccagtagatgcagcaagggaattgctggttgaaatgggtgacccgctagcactttatgaaactgacttagctagattgacgaaaagactgactgaattaatccctgcggtcggcgtgaagctgattattatcgatgagttccaacatttggtggaagaaaggtcaaatcgggttcttacccaagtaggtaattggctaaaaatgatacttaacaaaacgaaatgtccaattgttatatttggtatgccatactcaaaagttgtactgcaagcaaactcgcaacttcacgggcgattttccattcaggttgaactgcgcccctttagctaccagggaggtagaggtgtatttaaaacttttttggaataccttgataaagccctaccttttgaaaaacaggctggcttagccaacgaaagtttgcagaaaaaattgtatgcattctctcagggaaacatgcgttcgttgagaaaccttatttatcaagcatctatcgaagcaattgataatcagcatgagacgataaccgaagaagatttcgtttttgcatcgaagttgacatcgggcgataaacccaactcatggaaaaatccttttgaggagggtgttgaggtaacagaagatatgttacgaccgccaccaaaagatattggttgggaggactatttgagacattcaaccccgagagtgagtaaaccaggtagaaataaaaactttttcgaataacctaggctgctgcgctgctgccaccgctgagcaataactagcataaccccttggggcctctaaacgggtcttgaggggttttttgctgaaacctcaggcatttgttgttgatacaaccataaaatgataattacacccataaattgataattatcacacccataaattgatattgcctcttcatggtctaaacttcagtaagtttacgacattttcctcgaggtcatttccggggatccatggagaaaaaaatcactggatataccaccgttgatatatcccaatggcatcgtaaagaacattttgaggcatttcagtcagttgctcaatgtacctataaccagaccgttcagctggatattacggcctttttaaagaccgtaaagaaaaataagcacaagttttatccggcctttattcacattcttgcccgcctgatgaatgctcatccggagttccgtatggcaatgaaagacggtgagctggtgatatgggatagtgttcacccttgttacaccgttttccatgagcaaactgaaacgttttcatcgctctggagtgaataccacgacgatttccggcagtttctacacatatattcgcaagatgtggcgtgttacggtgaaaacctggcctatttccctaaagggtttattgagaatatgtttttcgtctcagccaatccctgggtgagtttcaccagttttgatttaaacgtggccaatatggacaacttcttcgcccccgttttcactatgggcaaatattatacgcaaggcgacaaggtgctgatgccgctggcgattcaggttcatcatgccgtttgtgatggcttccatgtcggcagaatgcttaatgaattacaacagtactgcgatgagtggcagggcggggcgtaatttttttaaggcagttattggtgcccttctagagtccttactgcagtagttttgctgaaatactcgattcacaaaaatatcaacttatggttgttttgtgagatatcaatatatggttgttttgtggttaagttgctgattataaataattattaaatatcactttatggttgcatcaacaggtaccgagctcgaattcactggccgtcgttttacaacgtcgtgactgggaaaaccctggcgttacccaacttaatcgccttgctatcgtggccggatcttgcggcccctcggcttgaacgaattgttagacattatttgccgactaccttggtgatctcgcctttcacgtagtggacaaattcttccaactgatctgcgcgcgaggccaagcgatcttcttcttgtccaagataagcctgtctagcttcaagtatgacgggctgatactgggccggcaggcgctccattgcccagtcggcagcgacatccttcggcgcgattttgccggttactgcgctgtaccaaatgcgggacaacgtaagcactacatttcgctcatcgccagcccagtcgggcggcgagttccatagcgttaaggtttcatttagcgcctcaaatagatcctgttcaggaaccggatcaaagagttcctccgccgctggacctaccaaggcaacgctatgttctcttgcttttgtcagcaagatagccagatcaatgtcgatcgtggctggctcgaagatacctgcaagaatgtcattgcgctgccattctccaaattgcagttcgcgcttagctggataacgccacggaatgatgtcgtcgtgcacaacaatggtgacttctacagcgcggagaatctcgctctctccaggggaagccgaagtttccaaaaggtcgttgatcaaagctcgccgcgttgtttcatcaagccttacggtcaccgtaaccagcaaatcaatatcactgtgtggcttcaggccgccatccactgcggagccgtacaaatgtacggccagcaacgtcggttcgagatggcgctcgatgacgccaactacctctgatagttgagtcgatacttcggcgatcaccgcttccctcatactcttcctttttcaatattattgaagcatttatcagggttattgtctcatgagcggatacatatttgaatgtatttagaaaaataaacaaatagctagctcactcggtcgctacgctccgggcgtgagactgcggcgggcgctgcggacacatacaaagttacccacagattccgtggataagcaggggactaacatgtgaggcaaaacagcagggccgcgccggtggcgtttttccataggctccgccctcctgccagagttcacataaacagacgcttttccggtgcatctgtgggagccgtgaggctcaaccatgaatctgacagtacgggcgaaacccgacaggacttaaagatccccaccgtttccggcgggtcgctccctcttgcgctctcctgttccgaccctgccgtttaccggatacctgttccgcctttctcccttacgggaagtgtggcgctttctcatagctcacacactggtatctcggctcggtgtaggtcgttcgctccaagctgggctgtaagcaagaactccccgttcagcccgactgctgcgccttatccggtaactgttcacttgagtccaacccggaaaagcacggtaaaacgccactggcagcagccattggtaactgggagttcgcagaggatttgtttagctaaacacgcggttgctcttgaagtgtgcgccaaagtccggctacactggaaggacagatttggttgctgtgctctgcgaaagccagttaccacggttaagcagttccccaactgacttaaccttcgatcaaaccacctccccaggtggttttttcgtttacagggcaaaagattacgcgcagaaaaaaaggatctcaagaagatcctttgatcttttctactgaaccgctctagatttcagtgcaatttatctcttcaaatgtagcacctgaagtcagccccatacgatataagttgtaattctcatgttagtcatgccccgcgcccaccggaaggagctgactgggttgaaggctctcaagggcatcggtcgagatcccggtgcctaatgagtgagctaacttacattaattgcgttgcgctcactgcccgctttccagtcgggaaacctgtcgtgccagctgcattaatgaatcggccaacgcgcggggagaggcggtttgcgtattgggcgccagggtggtttttcttttcaccagtgagacgggcaacagctgattgcccttcaccgcctggccctgagagagttgcagcaagcggtccacgctggtttgccccagcaggcgaaaatcctgtttgatggtggttaacggcgggatataacatgagctgtcttcggtatcgtcgtatcccactaccgagatgtccgcaccaacgcgcagcccggactcggtaatggcgcgcattgcgcccagcgccatctgatcgttggcaaccagcatcgcagtgggaacgatgccctcattcagcatttgcatggtttgttgaaaaccggacatggcactccagtcgccttcccgttccgctatcggctgaatttgattgcgagtgagatatttatgccagccagccagacgcagacgcgccgagacagaacttaatgggcccgctaacagcgcgatttgctggtgacccaatgcgaccagatgctccacgcccagtcgcgtaccgtcttcatgggagaaaataatactgttgatgggtgtctggtcagagacatcaagaaataacgccggaacattagtgcaggcagcttccacagcaatggcatcctggtcatccagcggatagttaatgatcagcccactgacgcgttgcgcgagaagattgtgcaccgccgctttacaggcttcgacgccgcttcgttctaccatcgacaccaccacgctggcacccagttgatcggcgcgagatttaatcgccgcgacaatttgcgacggcgcgtgcagggccagactggaggtggcaacgccaatcagcaacgactgtttgcccgccagttgttgtgccacgcggttgggaatgtaattcagctccgccatcgccgcttccactttttcccgcgttttcgcaga

SEQ ID NO: 76 - DNA, 12874 bp, artificial sequence
  Synthetic
aacgtggctggcctggttcaccacgcgggaaacggtctgataagagacaccggcatactctgcgacatcgtataacgttactggtttcacattcaccaccctgaattgactctcttccgggcgctatcatgccataccgcgaaaggttttgcgccattcgatggtgtccgggatctcgacgctctcccttatgcgactcctgcattaggaatggataaccgtattaccgcctttgagtgagctgataccgctcgccgcagccgaactaccgagcgcagcgagtcagtgagcgaggagcgactcctgcattaggaaattaatacgactcactataggggaattgtgagcggataacaattcccctgtagaaataattttgtttaactttaataaggagatataccatgggtgaactgccgagtaggtagctgataactggcccagttggtcgagcatatcaacagaaccgtgaactgccgagtaggtagctgataacggatccgaattcgagcgaaggagatatacatatgtttttgcaaagacctaaaccttacagcgatgaaagtttagaaagtttctttatccgagtggctaacaaaaatggctacggtgatgtccatcgcttcctagaagccactaaacgattccttcaagacattgaccataatggctatcaaacctttccgactgatataactcggataaacccatactcagctaaaaacagttccagcgcacgaactgcgtcattcctgaaacttgcacaattgacatttaatgaaccgccagagctacttgggttggcaattaacagaacaaacatgaaatactcgccgtcaactagcgcggttgttagaggtgcagaagtctttcctcgcagtttactacggacgcactccatcccctgctgtcctttgtgtctgcgagaaaatggctacgcctcctacctttggcactttcaggggtacgaatactgccacagccataacgtacctttaattaccacttgtagctgtggtaaggagtttgactaccgagtatctgggttaaagggcatttgctgcaaatgcaaggagcctatcaccttaaccagcagggagaacggtcatgaggcagcgtgtactgtttcaaactggcttgctggccatgaatctaaacctctgccaaatcttcctaaaagctaccgatggggtttagttcattggtggatgggtattaaagatagcgagttcgatcacttttcgttcgttcaatttttctcaaactggccaaggtcattccactcgataatcgaagatgaagtagagttcaaccttgagcatgctgttgtcagcacgtctgaattacgactaaaagatcttcttggtcgattgtttttcggttcaattcggttacctgagcggaatcttcaacacaatatcatccttggtgagcttctctgctatttagaaaatcgtttatggcaagacaagggattaatcgccaacctcaaaatgaacgcgttagaggcgactgtaatgttaaattgtagcctcgatcagattgcatcaatggttgaacaacgcatcttgaagccaaatcgaaaaagcaagcccaacagccctcttgatgttaccgattatctatttcatttcggcgatattttctgtctttggttagctgagttccaaagcgatgagtttaaccgttcgttttatgtgtcgaggtggtaaatgcaaactctgaaagaactaatcgcatccaatcctgacgacttaacaactgaacttaagagagcatttcgtccactcacaccgcatattgcaattgatggtaatgaacttgacgcactgacgatattagtcaatttaaccgataagactgatgatcagaaagacctgctcgatcgagccaaatgcaagcaaaaacttcgagatgaaaaatggtgggctagctgcataaattgcgttaattacagacaaagccataacccaaaattcccggatatacgttctgaaggcgtgattcgaacccaagccctgggtgaattaccgagtttcctactctcgtcctcaaaaatcccaccataccattggtcatatagccatgattcaaaatacgtcaacaaaagcgcattcctcaccaatgagttttgttgggatggtgagatctcatgtttgggtgagcttcttaaagatgcagatcacccactttggaatactttgaaaaagttaggttgttctcaaaaaacttgcaaagcaatggcaaaacaactagctgatattactctcacgactatcaatgtcacactcgcaccaaattacctgactcaaatatctctccccgatagtgatacatcctacatttcactctctcctgttgcatcgctatcgatgcaaagccactttcatcagaggctccaagatgaaaatcggcatagcgcgataacgcggtttagccgaactaccaacatgggggtcactgcgatgacatgtggcggcgcatttagaatgttaaagtctggcgctaagttttccagcccccctcatcaccgattaaacagtaaacgaagttggttgacgtcagagcatgttcagtcattaaaacagtaccagcgcctcaacaaaagcctcatacctgaaaactctcggattgcactccgtagaaaatacaaaatcgagcttcaaaatatggtcagatcttggtttgcaatgcaagaccatacccttgattcgaacatacttatccaacatttgaatcatgacctatcttacttaggagccacaaaacgttttgcatacgatccagcgatgaccaagctctttactgagcttttgaaacgagagttatcaaattcaatcaataatggtgagcaacacactaatggatcgtttttagtcctaccgaatatcagggtttgtggcgcaacagctttaagctccccggtaacggtggggattccatcacttacagctttctttggcttcgttcacgcatttgaacggaatataaatcgcaccacctcatcgtttcgtgttgaatcctttgcgatatgcgtccatcaactacatgtcgagaagcgaggtttgacagcagagtttgtggaaaaaggcgacgggactatatccgctcccgcgacccgggatgactggcagtgtgatgtcgtatttagccttattttgaacaccaactttgctcaacatattgaccaagatacgttagttacatcactaccaaagcgattggctcggggttcagcaaaaattgcgattgatgactttaaacatatcaactcattctcgacattagaaacagcgatcgaatctctgccaatagaagctggtaggtggttatcactttacgcacagtcaaacaataatctaagtgatctattagcagccatgacagaggaccatcagctcatggcaagctgcgtcggttaccacttgttagaagagcccaaagataaaccaaactccctcagaggttacaaacacgctatcgccgagtgcatcattggactcattaactcaatcacctttagctcagagactgatcccaacacaatcttttggtcgctaaagaactatcaaaactacctagtggtacagccaaggagtatcaacgatgaaactaccgacaaatctagcctatgagcgctctatcgacccatcagatgtctgtttttttgtcgtctggcccgatgatagaaaaacacctttaacctacaattctcgtactctgctcgggcaaatggaagcggcatcattagcctatgatgtctcaggtcaaccaataaaaagtgccaccgctgaggcgttagctcaagggaaccctcatcaagttgatttctgccacgttccatacggtgcgagtcatattgaatgcagtttctccgtctcgttttcttctgaactacgtcaaccatataagtgtaactcaagcaaagttaaacaaacgctagtgcaattagtcgagctctacgaaacgaaaatcggctggactgagctagcaacccgatatttgatgaacatttgcaacggtaaatggctgtggaaaaatacccgtaaagcctattgctggaacattgtacttacaccttggccttggaacggggaaaaggttggatttgaagatattcgtactaactacacctcacggcaagactttaaaaataataaaaattggtctgctatagttgaaatgatcaaaaccgcattttctagtactgatgggctggcgatatttgaagtcagggccaccttgcacttgccaacgaatgctatggtgcggccaagccaagttttcacagaaaaagaaagtggcagtaaaagtaaatctaaaactcaaaacagtcgagtttttcagagtacaactattgatggtgaacgatcgccaatactaggggcctttaaaacgggagcagctattgcaaccattgacgactggtatcctgaagccactgagccactaagggtcggacggtttggggttcatcgcgaagatgtcacttgctaccgtcatccgtctaccggaaaagattttttctcgatattacaacaagcagagcactatattgaagtgttgagcgccaacaaaactcccgctcaagaaactatcaacgacatgcactttttaatggctaacctgattaagggtgggatgttccagcataaaggagactgactgtgaaatggtattataagacaatcacctttctgccagagttgtgcaacaacgagtcactggctgcaaagtgtctccgcgttctgcatggatttaactatcagtatgagacacgaaatatcggcgtttcatttccgctttggtgtgatgcaacggttggaaaaaagatttcatttgtcagcaagaacaagatagaactcgacttactacttaaacaacactatttcgtccaaatggaacaacttcaatactttcatatatccaacactgttctcgtcccagaagattgtacatacgtttcctttagacgctgtcaatctatagataagctcacagcagcagggctggcaaggaaaatcagacgcctggagaaacgtgctctatctagaggcgagcaatttgacccatcatcttttgctcaaaaagagcatactgcaatagcgcactaccactcacttggggagtccagcaaacagacgaaccgcaactttcgactcaatatcaggatgctctcggagcaaccccgtgaggggaactcgatttttagtagctatggcttatcaaattcagaaaactcgtttcagcctgtacccttaatctgacctttaataaggagatataccatggcgacaagtttacctacgccctcagcaattacgacttcggcgttagagtatgcattccatactcccgctcgcaatctaacgaaatctcgcggaaaaaacattcatcgttatgtcagtgtaaagatgagtaagaggattacggtagaatctactctagagtgtgatgcctgctatcactttgattttgagccaagtattgttcgcttttgcgctcaaccgattcgatttttatattatctcaatggtcagtctcactcctatgttcctgactttctagttcaatttgataccaacgagtttgttctatatgaagtaaagtcagcttatgctaagaacaaacctgattttgatgttgaatgggaggcgaaagtaaaagcagcaactgaactagggctagaattggagcttgttgaagagagtgatattagggatacggttgtattaaataatcttaagcgcatgcatcgttatgcttcgaaagatgagctgaataacgtacataactctctcttaaaaataataaagtacaatggcgcccaatctgcaagatgcttgggagaacagttgggtttaaaaggccgaactgttttaccaattttgtgcgatttgctgtcaaggtgtttactcgatacacgtttggataagcctctatctcttgaatctcgatttgagttggccagttatggctaagaaagggttctcaagtttccatagaaaagcagtctcttcccaagatacgcttgaatcgatagagcttgtctctagcgctaattgtctagaaagtgttacgtatcaagatatatcagcatttcccgaaacaattgcggtagagattaatttccgattaagcattcttcgctttttagcgcgaaagtgcgaaaccattgtggccaaatcaattgaaccacatcgtgtagagctacagcaaaactatagtagaaaaatacccagtgcaataacgatatatcgatggtggcttgcttttcgaaaatcagactacaaccccattagcttagcacctaatatcaaggatagaggtaatagagagacaaaagtgtcaacagttgttgattctattatggaacaggcagttgaaagagttatatctggacgaaaagtcaatgttagctctgcatataaacgtgttcgacgaaaagttcgtcaatacaatctaactcatggaacgaaatacacgtatcctaagtacgaatctgtaagaaagcgagtaaaaaagaaaaccccatttgagttattagccgcagggaaaggggagagagtagctaagagagagtttcgccgaatgggaaaaaagatcctcacgtctagcgtgctagagagggttgaaatagatcacactgtcgttgacctttttgcagtacacgaagagtatcgaatcccattgggccgaccttggcttactcaattggttgattgttacagtaaagctgtaatcggtttttatttaggtttcgagcctcctagctatgtgtcggtttcccttgcacttaagaatgcaatacaacgcaaagatgacttaatctcctcgtatgaatcgatcgagaatgaatggctatgttatggcatcccagacctactcgtaactgataatggtaaagagtttttgtcgaaagcatttgatcaagcatgtgaatcactattgatcaatgtgcatcaaaataaagttgagacgcccgacaacaaacctcatgttgaacgtaactacgggactattaatacttctctgttagacgatttacctgggaaatccttcagccagtaccttcaaagagaagggtacgactctgtgggagaagctacccttacactcaatgagattagagaaatttacttaatttggttggtggatatttatcataaaaaacccaatcagagaggcactaattgccctaatgttgcgtggaaaaagggttgtcaagaatgggaaccagaggagttctctggttctaaagacgaattagactttaaatttgctattgttgattacaaacaacttactaaagtagggataactgtctacaaagaactgagttatagcaatgaccgtttagctgaatatagagggaagaaaggaaaccataaagttcagttcaagtataaccctgagtgtatggcagttatttgggtgttggatgaggatatgaatgagtactttacagttaatgcgattgactacgaatatgcaagtagagtatcactttggcaacataaatataacatgaaatatcaagcagaactaaattcagcagaatatgatgaggacaaggaaattgatgcagaaataaaaattgaagaaatcgcagatcgttcaattgttaagactaacaaaatcagagctcggaggcgtggcgctaggcatcaagagaatagcgcaagggctaagtcaatcagtaatgcgaacccggcctcgatacaaaaacatgaagatgaaatcgttagtgcagataatgacgattgggatattgattatgtctgagaaatcgtcaaatgagtgaaacgcgtgaggctcgtatatcaagagctaaaagggcatttgtatccacaccgagcgttaggaaaatcttgagttacatggatagatgtagagatctatcagacctagagtctgagcctacatgcatgatggtctatggtgcttcgggtgtaggtaaaacgaccgtcatcaagaaatacttaaatcaaaacagaagagagtccgaagccgggggcgatataataccggttttgcatattgagttgccagacaatgcgaagccagtagatgcagcaagggaattgctggttgaaatgggtgacccgctagcactttatgaaactgacttagctagattgacgaaaagactgactgaattaatccctgcggtcggcgtgaagctgattattatcgatgagttccaacatttggtggaagaaaggtcaaatcgggttcttacccaagtaggtaattggctaaaaatgatacttaacaaaacgaaatgtccaattgttatatttggtatgccatactcaaaagttgtactgcaagcaaactcgcaacttcacgggcgattttccattcaggttgaactgcgcccctttagctaccagggaggtagaggtgtatttaaaacttttttggaataccttgataaagccctaccttttgaaaaacaggctggcttagccaacgaaagtttgcagaaaaaattgtatgcattctctcagggaaacatgcgttcgttgagaaaccttatttatcaagcatctatcgaagcaattgataatcagcatgagacgataaccgaagaagatttcgtttttgcatcgaagttgacatcgggcgataaacccaactcatggaaaaatccttttgaggagggtgttgaggtaacagaagatatgttacgaccgccaccaaaagatattggttgggaggactatttgagacattcaaccccgagagtgagtaaaccaggtagaaataaaaactttttcgaataacctaggctgctgcgctgctgccaccgctgagcaataactagcataaccccttggggcctctaaacgggtcttgaggggttttttgctgaaacctcaggcatttgttgttgatacaaccataaaatgataattacacccataaattgataattatcacacccataaattgatattgcctcttcatggtctaaacttcagtaagtttacgacattttcctcgaggtcatttccggggatccatggagaaaaaaatcactggatataccaccgttgatatatcccaatggcatcgtaaagaacattttgaggcatttcagtcagttgctcaatgtacctataaccagaccgttcagctggatattacggcctttttaaagaccgtaaagaaaaataagcacaagttttatccggcctttattcacattcttgcccgcctgatgaatgctcatccggagttccgtatggcaatgaaagacggtgagctggtgatatgggatagtgttcacccttgttacaccgttttccatgagcaaactgaaacgttttcatcgctctggagtgaataccacgacgatttccggcagtttctacacatatattcgcaagatgtggcgtgttacggtgaaaacctggcctatttccctaaagggtttattgagaatatgtttttcgtctcagccaatccctgggtgagtttcaccagttttgatttaaacgtggccaatatggacaacttcttcgcccccgttttcactatgggcaaatattatacgcaaggcgacaaggtgctgatgccgctggcgattcaggttcatcatgccgtttgtgatggcttccatgtcggcagaatgcttaatgaattacaacagtactgcgatgagtggcagggcggggcgtaatttttttaaggcagttattggtgcccttctagagtccttactgcagtagttttgctgaaatactcgattcacaaaaatatcaacttatggttgttttgtgagatatcaatatatggttgttttgtggttaagttgctgattataaataattattaaatatcactttatggttgcatcaacaggtaccgagctcgaattcactggccgtcgttttacaacgtcgtgactgggaaaaccctggcgttacccaacttaatcgccttgctatcgtggccggatcttgcggcccctcggcttgaacgaattgttagacattatttgccgactaccttggtgatctcgcctttcacgtagtggacaaattcttccaactgatctgcgcgcgaggccaagcgatcttcttcttgtccaagataagcctgtctagcttcaagtatgacgggctgatactgggccggcaggcgctccattgcccagtcggcagcgacatccttcggcgcgattttgccggttactgcgctgtaccaaatgcgggacaacgtaagcactacatttcgctcatcgccagcccagtcgggcggcgagttccatagcgttaaggtttcatttagcgcctcaaatagatcctgttcaggaaccggatcaaagagttcctccgccgctggacctaccaaggcaacgctatgttctcttgcttttgtcagcaagatagccagatcaatgtcgatcgtggctggctcgaagatacctgcaagaatgtcattgcgctgccattctccaaattgcagttcgcgcttagctggataacgccacggaatgatgtcgtcgtgcacaacaatggtgacttctacagcgcggagaatctcgctctctccaggggaagccgaagtttccaaaaggtcgttgatcaaagctcgccgcgttgtttcatcaagccttacggtcaccgtaaccagcaaatcaatatcactgtgtggcttcaggccgccatccactgcggagccgtacaaatgtacggccagcaacgtcggttcgagatggcgctcgatgacgccaactacctctgatagttgagtcgatacttcggcgatcaccgcttccctcatactcttcctttttcaatattattgaagcatttatcagggttattgtctcatgagcggatacatatttgaatgtatttagaaaaataaacaaatagctagctcactcggtcgctacgctccgggcgtgagactgcggcgggcgctgcggacacatacaaagttacccacagattccgtggataagcaggggactaacatgtgaggcaaaacagcagggccgcgccggtggcgtttttccataggctccgccctcctgccagagttcacataaacagacgcttttccggtgcatctgtgggagccgtgaggctcaaccatgaatctgacagtacgggcgaaacccgacaggacttaaagatccccaccgtttccggcgggtcgctccctcttgcgctctcctgttccgaccctgccgtttaccggatacctgttccgcctttctcccttacgggaagtgtggcgctttctcatagctcacacactggtatctcggctcggtgtaggtcgttcgctccaagctgggctgtaagcaagaactccccgttcagcccgactgctgcgccttatccggtaactgttcacttgagtccaacccggaaaagcacggtaaaacgccactggcagcagccattggtaactgggagttcgcagaggatttgtttagctaaacacgcggttgctcttgaagtgtgcgccaaagtccggctacactggaaggacagatttggttgctgtgctctgcgaaagccagttaccacggttaagcagttccccaactgacttaaccttcgatcaaaccacctccccaggtggttttttcgtttacagggcaaaagattacgcgcagaaaaaaaggatctcaagaagatcctttgatcttttctactgaaccgctctagatttcagtgcaatttatctcttcaaatgtagcacctgaagtcagccccatacgatataagttgtaattctcatgttagtcatgccccgcgcccaccggaaggagctgactgggttgaaggctctcaagggcatcggtcgagatcccggtgcctaatgagtgagctaacttacattaattgcgttgcgctcactgcccgctttccagtcgggaaacctgtcgtgccagctgcattaatgaatcggccaacgcgcggggagaggcggtttgcgtattgggcgccagggtggtttttcttttcaccagtgagacgggcaacagctgattgcccttcaccgcctggccctgagagagttgcagcaagcggtccacgctggtttgccccagcaggcgaaaatcctgtttgatggtggttaacggcgggatataacatgagctgtcttcggtatcgtcgtatcccactaccgagatgtccgcaccaacgcgcagcccggactcggtaatggcgcgcattgcgcccagcgccatctgatcgttggcaaccagcatcgcagtgggaacgatgccctcattcagcatttgcatggtttgttgaaaaccggacatggcactccagtcgccttcccgttccgctatcggctgaatttgattgcgagtgagatatttatgccagccagccagacgcagacgcgccgagacagaacttaatgggcccgctaacagcgcgatttgctggtgacccaatgcgaccagatgctccacgcccagtcgcgtaccgtcttcatgggagaaaataatactgttgatgggtgtctggtcagagacatcaagaaataacgccggaacattagtgcaggcagcttccacagcaatggcatcctggtcatccagcggatagttaatgatcagcccactgacgcgttgcgcgagaagattgtgcaccgccgctttacaggcttcgacgccgcttcgttctaccatcgacaccaccacgctggcacccagttgatcggcgcgagatttaatcgccgcgacaatttgcgacggcgcgtgcagggccagactggaggtggcaacgccaatcagcaacgactgtttgcccgccagttgttgtgccacgcggttgggaatgtaattcagctccgccatcgccgcttccactttttcccgcgttttcgcaga

SEQ ID NO: 77 - DNA, 14031 bp, artificial sequence
  Synthetic
ccgccgtgggtttcctcgcaataagcccggcccacgcctcatgcgctttgcgttccgtttgcacccagtgaccgggcttgttcttggcttgaatgccgatttctctggactgcgtggccatgcttatctccatgcggtaggggtgccgcacggttgcggcaccatgcgcaatcagctgcaacttttcggcagcgcgacaacaattatgcgttgcgtaaaagtggcagtcaattacagattttctttaacctacgcaatgagctattgcggggggtgccgcaatgagctgttgcgtaccccccttttttaagttgttgatttttaagtctttcgcatttcgccctatatctagttctttggtgcccaaagaagggcacccctgcggggttcccccacgccttcggcgcggctccccctccggcaaaaagtggcccctccggggcttgttgatcgactgcgcggccttcggccttgcccaaggtggcgctgcccccttggaacccccgcactcgccgccgtgaggctcggggggcaggcgggcgggcttcgcccttcgactgcccccactcgcataggcttgggtcgttccaggcgcgtcaaggccaagccgctgcgcggtcgctgcgcgagccttgacccgccttccacttggtgtccaaccggcaagcgaagcgcgcaggccgcaggccggaggcttttccccagagaaaattaaaaaaattgatggggcaaggccgcaggccgcgcagttggagccggtgggtatgtggtcgaaggctgggtagccggtgggcaatccctgtggtcaagctcgtgggcaggcgcagcctgtccatcagcttgtccagcagggttgtccacgggccgagcgaagcgagccagccggtggccgctcgcggccatcgtccacatatccacgggctggcaagggagcgcagcgaccgcgcagggcgaagcccggagagcaagcccgtagggcgccgcagccgccgtaggcggtcacgactttgcgaagcaaagtctagtgagtatactcaagcattgagtggcccgccggaggcaccgccttgcgctgcccccgtcgagccggttggacaccaaaagggaggggcaggcatggcggcatacgcgatcatgcgatgcaagaagctggcgaaaatgggcaacgtggcggccagtctcaagcacgcctaccgcgagcgcgagacgcccaacgctgacgccagcaggacgccagagaacgagcactgggcggccagcagcaccgatgaagcgatgggccgactgcgcgagttgctgccagagaagcggcgcaaggacgctgtgttggcggtcgagtacgtcatgacggccagcccggaatggtggaagtcggccagccaagaacagcaggcggcgttcttcgagaaggcgcacaagtggctggcggacaagtacggggcggatcgcatcgtgacggccagcatccaccgtgacgaaaccagcccgcacatgaccgcgttcgtggtgccgctgacgcaggacggcaggctgtcggccaaggagttcatcggcaacaaagcgcagatgacccgcgaccagaccacgtttgcggccgctgtggccgatctagggctgcaacggggcatcgagggcagcaaggcacgtcacacgcgcattcaggcgttctacgaggccctggagcggccaccagtgggccacgtcaccatcagcccgcaagcggtcgagccacgcgcctatgcaccgcagggattggccgaaaagctgggaatctcaaagcgcgttgagacgccggaagccgtggccgaccggctgacaaaagcggttcggcaggggtatgagcctgccctacaggccgccgcaggagcgcgtgagatgcgcaagaaggccgatcaagcccaagagacggcccgtgaccttcgggagcgcctgaagcccgttctggacgccctggggccgttgaatcgggatatgcaggccaaggccgccgcgatcatcaaggccgtgggcgaaaagctgctgacggaacagcgggaagtccagcgccagaaacaggcccagcgccagcaggaacgcgggcgcgcacatttccccgaaaagtgccacctgggatgaatgtcagctactgggctatctggacaagggaaaacgcaagcgcaaagagaaagcaggtagcttgcagtgggcttacatggcgatagctagactgggcggttttatggacagcaagcgaaccggaattgccagctggggcgccctctggtaaggttgggaagccctgcaaagtaaactggatggctttcttgccgccaaggatctgatggcgcaggggatcaagatctgatcaagagacaggatgaggatcgtttcgcatgattgaacaagatggattgcacgcaggttctccggccgcttgggtggagaggctattcggctatgactgggcacaacagacaatcggctgctctgatgccgccgtgttccggctgtcagcgcaggggcgcccggttctttttgtcaagaccgacctgtccggtgccctgaatgaactgcaagacgaggcagcgcggctatcgtggctggccacgacgggcgttccttgcgcagctgtgctcgacgttgtcactgaagcgggaagggactggctgctattgggcgaagtgccggggcaggatctcctgtcatctcaccttgctcctgccgagaaagtatccatcatggctgatgcaatgcggcggctgcatacgcttgatccggctacctgcccattcgaccaccaagcgaaacatcgcatcgagcgagcacgtactcggatggaagccggtcttgtcgatcaggatgatctggacgaagagcatcaggggctcgcgccagccgaactgttcgccaggctcaaggcgcgcatgcccgacggcgaggatctcgtcgtgacccatggcgatgcctgcttgccgaatatcatggtggaaaatggccgcttttctggattcatcgactgtggccggctgggtgtggcggaccgctatcaggacatagcgttggctacccgtgatattgctgaagagcttggcggcgaatgggctgaccgcttcctcgtgctttacggtatcgccgctcccgattcgcagcgcatcgccttctatcgccttcttgacgagttcttctgagcgggactctggggttcgaaatgaccgaccaagcgacgcccaacctgccatcacgagatttcgattccaccgccgccttctatgaaaggttgggcttcggaatcgttttccgggacgccggctggatgatcctccagcgcggggatctcatgctggagttcttcgcccacccccatgggcaaatattatacgcaaggcgacaaggtgctgatgccgctggcgattcaggttcatcatgccgtttgtgatggcttccatgtcggcagaatgcttaatgaattacaacagtttttatgcatgcgcccaatacgcaaaccgcctctccccgcgcgttggccgattcattaatgcagctggcacgacaggtttcccgactggtggataaccgtattaccgcctttgagtgagctgataccgctcgccgcagccgaacgaccgagcgcagcgagtcagtgagcgaggacacaagctttgacagctagctcagtcctaggtataatactagcgtcgacgtggagatataccatgggtgaactgccgagtaggtagctgataacgagacctctgtcttgtcagctagggtggtctcgtgaactgccgagtaggtagctgataacggatccgaattcgagcgaaggagatatacatatgtttttgcaaagacctaaaccttacagcgatgaaagtttagaaagtttctttatccgagtggctaacaaaaatggctacggtgatgtccatcgcttcctagaagccactaaacgattccttcaagacattgaccataatggctatcaaacctttccgactgatataactcggataaacccatactcagctaaaaacagttccagcgcacgaactgcgtcattcctgaaacttgcacaattgacatttaatgaaccgccagagctacttgggttggcaattaacagaacaaacatgaaatactcgccgtcaactagcgcggttgttagaggtgcagaagtctttcctcgcagtttactacggacgcactccatcccctgctgtcctttgtgtctgcgagaaaatggctacgcctcctacctttggcactttcaggggtacgaatactgccacagccataacgtacctttaattaccacttgtagctgtggtaaggagtttgactaccgagtatctgggttaaagggcatttgctgcaaatgcaaggagcctatcaccttaaccagcagggagaacggtcatgaggcagcgtgtactgtttcaaactggcttgctggccatgaatctaaacctctgccaaatcttcctaaaagctaccgatggggtttagttcattggtggatgggtattaaagatagcgagttcgatcacttttcgttcgttcaatttttctcaaactggccaaggtcattccactcgataatcgaagatgaagtagagttcaaccttgagcatgctgttgtcagcacgtctgaattacgactaaaagatcttcttggtcgattgtttttcggttcaattcggttacctgagcggaatcttcaacacaatatcatccttggtgagcttctctgctatttagaaaatcgtttatggcaagacaagggattaatcgccaacctcaaaatgaacgcgttagaggcgactgtaatgttaaattgtagcctcgatcagattgcatcaatggttgaacaacgcatcttgaagccaaatcgaaaaagcaagcccaacagccctcttgatgttaccgattatctatttcatttcggcgatattttctgtctttggttagctgagttccaaagcgatgagtttaaccgttcgttttatgtgtcgaggtggtaaatgcaaactctgaaagaactaatcgcatccaatcctgacgacttaacaactgaacttaagagagcatttcgtccactcacaccgcatattgcaattgatggtaatgaacttgacgcactgacgatattagtcaatttaaccgataagactgatgatcagaaagacctgctcgatcgagccaaatgcaagcaaaaacttcgagatgaaaaatggtgggctagctgcataaattgcgttaattacagacaaagccataacccaaaattcccggatatacgttctgaaggcgtgattcgaacccaagccctgggtgaattaccgagtttcctactctcgtcctcaaaaatcccaccataccattggtcatatagccatgattcaaaatacgtcaacaaaagcgcattcctcaccaatgagttttgttgggatggtgagatctcatgtttgggtgagcttcttaaagatgcagatcacccactttggaatactttgaaaaagttaggttgttctcaaaaaacttgcaaagcaatggcaaaacaactagctgatattactctcacgactatcaatgtcacactcgcaccaaattacctgactcaaatatctctccccgatagtgatacatcctacatttcactctctcctgttgcatcgctatcgatgcaaagccactttcatcagaggctccaagatgaaaatcggcatagcgcgataacgcggtttagccgaactaccaacatgggggtcactgcgatgacatgtggcggcgcatttagaatgttaaagtctggcgctaagttttccagcccccctcatcaccgattaaacagtaaacgaagttggttgacgtcagagcatgttcagtcattaaaacagtaccagcgcctcaacaaaagcctcatacctgaaaactctcggattgcactccgtagaaaatacaaaatcgagcttcaaaatatggtcagatcttggtttgcaatgcaagaccatacccttgattcgaacatacttatccaacatttgaatcatgacctatcttacttaggagccacaaaacgttttgcatacgatccagcgatgaccaagctctttactgagcttttgaaacgagagttatcaaattcaatcaataatggtgagcaacacactaatggatcgtttttagtcctaccgaatatcagggtttgtggcgcaacagctttaagctccccggtaacggtggggattccatcacttacagctttctttggcttcgttcacgcatttgaacggaatataaatcgcaccacctcatcgtttcgtgttgaatcctttgcgatatgcgtccatcaactacatgtcgagaagcgaggtttgacagcagagtttgtggaaaaaggcgacgggactatatccgctcccgcgacccgggatgactggcagtgtgatgtcgtatttagccttattttgaacaccaactttgctcaacatattgaccaagatacgttagttacatcactaccaaagcgattggctcggggttcagcaaaaattgcgattgatgactttaaacatatcaactcattctcgacattagaaacagcgatcgaatctctgccaatagaagctggtaggtggttatcactttacgcacagtcaaacaataatctaagtgatctattagcagccatgacagaggaccatcagctcatggcaagctgcgtcggttaccacttgttagaagagcccaaagataaaccaaactccctcagaggttacaaacacgctatcgccgagtgcatcattggactcattaactcaatcacctttagctcagagactgatcccaacacaatcttttggtcgctaaagaactatcaaaactacctagtggtacagccaaggagtatcaacgatgaaactaccgacaaatctagcctatgagcgctctatcgacccatcagatgtctgtttttttgtcgtctggcccgatgatagaaaaacacctttaacctacaattctcgtactctgctcgggcaaatggaagcggcatcattagcctatgatgtctcaggtcaaccaataaaaagtgccaccgctgaggcgttagctcaagggaaccctcatcaagttgatttctgccacgttccatacggtgcgagtcatattgaatgcagtttctccgtctcgttttcttctgaactacgtcaaccatataagtgtaactcaagcaaagttaaacaaacgctagtgcaattagtcgagctctacgaaacgaaaatcggctggactgagctagcaacccgatatttgatgaacatttgcaacggtaaatggctgtggaaaaatacccgtaaagcctattgctggaacattgtacttacaccttggccttggaacggggaaaaggttggatttgaagatattcgtactaactacacctcacggcaagactttaaaaataataaaaattggtctgctatagttgaaatgatcaaaaccgcattttctagtactgatgggctggcgatatttgaagtcagggccaccttgcacttgccaacgaatgctatggtgcggccaagccaagttttcacagaaaaagaaagtggcagtaaaagtaaatctaaaactcaaaacagtcgagtttttcagagtacaactattgatggtgaacgatcgccaatactaggggcctttaaaacgggagcagctattgcaaccattgacgactggtatcctgaagccactgagccactaagggtcggacggtttggggttcatcgcgaagatgtcacttgctaccgtcatccgtctaccggaaaagattttttctcgatattacaacaagcagagcactatattgaagtgttgagcgccaacaaaactcccgctcaagaaactatcaacgacatgcactttttaatggctaacctgattaagggtgggatgttccagcataaaggagactgactgtgaaatggtattataagacaatcacctttctgccagagttgtgcaacaacgagtcactggctgcaaagtgtctccgcgttctgcatggatttaactatcagtatgagacacgaaatatcggcgtttcatttccgctttggtgtgatgcaacggttggaaaaaagatttcatttgtcagcaagaacaagatagaactcgacttactacttaaacaacactatttcgtccaaatggaacaacttcaatactttcatatatccaacactgttctcgtcccagaagattgtacatacgtttcctttagacgctgtcaatctatagataagctcacagcagcagggctggcaaggaaaatcagacgcctggagaaacgtgctctatctagaggcgagcaatttgacccatcatcttttgctcaaaaagagcatactgcaatagcgcactaccactcacttggggagtccagcaaacagacgaaccgcaactttcgactcaatatcaggatgctctcggagcaaccccgtgaggggaactcgatttttagtagctatggcttatcaaattcagaaaactcgtttcagcctgtacccttaatctgacctttaataaggagatataccatggcgacaagtttacctacgccctcagcaattacgacttcggcgttagagtatgcattccatactcccgctcgcaatctaacgaaatctcgcggaaaaaacattcatcgttatgtcagtgtaaagatgagtaagaggattacggtagaatctactctagagtgtgatgcctgctatcactttgattttgagccaagtattgttcgcttttgcgctcaaccgattcgatttttatattatctcaatggtcagtctcactcctatgttcctgactttctagttcaatttgataccaacgagtttgttctatatgaagtaaagtcagcttatgctaagaacaaacctgattttgatgttgaatgggaggcgaaagtaaaagcagcaactgaactagggctagaattggagcttgttgaagagagtgatattagggatacggttgtattaaataatcttaagcgcatgcatcgttatgcttcgaaagatgagctgaataacgtacataactctctcttaaaaataataaagtacaatggcgcccaatctgcaagatgcttgggagaacagttgggtttaaaaggccgaactgttttaccaattttgtgcgatttgctgtcaaggtgtttactcgatacacgtttggataagcctctatctcttgaatctcgatttgagttggccagttatggctaagaaagggttctcaagtttccatagaaaagcagtctcttcccaagatacgcttgaatcgatagagcttgtctctagcgctaattgtctagaaagtgttacgtatcaagatatatcagcatttcccgaaacaattgcggtagagattaatttccgattaagcattcttcgctttttagcgcgaaagtgcgaaaccattgtggccaaatcaattgaaccacatcgtgtagagctacagcaaaactatagtagaaaaatacccagtgcaataacgatatatcgatggtggcttgcttttcgaaaatcagactacaaccccattagcttagcacctaatatcaaggatagaggtaatagagagacaaaagtgtcaacagttgttgattctattatggaacaggcagttgaaagagttatatctggacgaaaagtcaatgttagctctgcatataaacgtgttcgacgaaaagttcgtcaatacaatctaactcatggaacgaaatacacgtatcctaagtacgaatctgtaagaaagcgagtaaaaaagaaaaccccatttgagttattagccgcagggaaaggggagagagtagctaagagagagtttcgccgaatgggaaaaaagatcctcacgtctagcgtgctagagagggttgaaatagatcacactgtcgttgacctttttgcagtacacgaagagtatcgaatcccattgggccgaccttggcttactcaattggttgattgttacagtaaagctgtaatcggtttttatttaggtttcgagcctcctagctatgtgtcggtttcccttgcacttaagaatgcaatacaacgcaaagatgacttaatctcctcgtatgaatcgatcgagaatgaatggctatgttatggcatcccagacctactcgtaactgataatggtaaagagtttttgtcgaaagcatttgatcaagcatgtgaatcactattgatcaatgtgcatcaaaataaagttgagacgcccgacaacaaacctcatgttgaacgtaactacgggactattaatacttctctgttagacgatttacctgggaaatccttcagccagtaccttcaaagagaagggtacgactctgtgggagaagctacccttacactcaatgagattagagaaatttacttaatttggttggtggatatttatcataaaaaacccaatcagagaggcactaattgtcctaatgttgcgtggaaaaagggttgtcaagaatgggaaccagaggagttctctggttctaaagacgaattagactttaaatttgctattgttgattacaaacaacttactaaagtagggataactgtctacaaagaactgagttatagcaatgaccgtttagctgaatatagagggaagaaaggaaaccataaagttcagttcaagtataaccctgagtgtatggcagttatttgggtgttggatgaggatatgaatgagtactttacagttaatgcgattgactacgaatatgcaagtagagtatcactttggcaacataaatataacatgaaatatcaagcagaactaaattcagcagaatatgatgaggacaaggaaattgatgcagaaataaaaattgaagaaatcgcagatcgttcaattgttaagactaacaaaatcagagctcggaggcgtggcgctaggcatcaagagaatagcgcaagggctaagtcaatcagtaatgcgaacccggcctcgatacaaaaacatgaagatgaaatcgttagtgcagataatgacgattgggatattgattatgtctgagaaatcgtcaaatgagtgaaacgcgtgaggctcgtatatcaagagctaaaagggcatttgtatccacaccgagcgttaggaaaatcttgagttacatggatagatgtagagatctatcagacctagagtctgagcctacatgcatgatggtctatggtgcttcgggtgtaggtaaaacgaccgtcatcaagaaatacttaaatcaaaacagaagagagtccgaagccgggggcgatataataccggttttgcatattgagttgccagacaatgcgaagccagtagatgcagcaagggaattgctggttgaaatgggtgacccgctagcactttatgaaactgacttagctagattgacgaaaagactgactgaattaatccctgcggtcggcgtgaagctgattattatcgatgagttccaacatttggtggaagaaaggtcaaatcgggttcttacccaagtaggtaattggctaaaaatgatacttaacaaaacgaaatgtccaattgttatatttggtatgccatactcaaaagttgtactgcaagcaaactcgcaacttcacgggcgattttccattcaggttgaactgcgcccctttagctaccagggaggtagaggtgtatttaaaacttttttggaataccttgataaagccctaccttttgaaaaacaggctggcttagccaacgaaagtttgcagaaaaaattgtatgcattctctcagggaaacatgcgttcgttgagaaaccttatttatcaagcatctatcgaagcaattgataatcagcatgagacgataaccgaagaagatttcgtttttgcatcgaagttgacatcgggcgataaacccaactcatggaaaaatccttttgaggagggtgttgaggtaacagaagatatgttacgaccgccaccaaaagatattggttgggaggactatttgagacattcaaccccgagagtgagtaaaccaggtagaaataaaaactttttcgaataacctaggctgctgcgctgctgccaccgctgagcaataactagcataaccccttggggcctctaaacgggtcttgaggggttttttgctgaaacctcaggcatttgttgttgatacaaccataaaatgataattacacccataaattgataattatcacacccataaattgatattgcctcttcatggtctaaacttcagtaagtttacgacattttcctcgaggtcatttccggggatccatggagaaaaaaatcactggatataccaccgttgatatatcccaatggcatcgtaaagaacattttgaggcatttcagtcagttgctcaatgtacctataaccagaccgttcagctggatattacggcctttttaaagaccgtaaagaaaaataagcacaagttttatccggcctttattcacattcttgcccgcctgatgaatgctcatccggagttccgtatggcaatgaaagacggtgagctggtgatatgggatagtgttcacccttgttacaccgttttccatgagcaaactgaaacgttttcatcgctctggagtgaataccacgacgatttccggcagtttctacacatatattcgcaagatgtggcgtgttacggtgaaaacctggcctatttccctaaagggtttattgagaatatgtttttcgtctcagccaatccctgggtgagtttcaccagttttgatttaaacgtggccaatatggacaacttcttcgcccccgttttcactatgggcaaatattatacgcaaggcgacaaggtgctgatgccgctggcgattcaggttcatcatgccgtttgtgatggcttccatgtcggcagaatgcttaatgaattacaacagtactgcgatgagtggcagggcggggcgtaatttttttaaggcagttattggtgcccttctagagtccttactgcagtagttttgctgaaatactcgattcacaaaaatatcaacttatggttgttttgtgagatatcaatatatggttgttttgtggttaagttgctgattataaataattattaaatatcactttatggttgcatcaacaggtaccgagctcgaattcactggccgtcgttttacaacgtcgtgactgggaaaaccctggcgttacccaacttaatcgccttgcggccagtttgctcaggctctccccgtggaggtaataattgacgatatgatcatttattctgcctcccagagcctgataaaaacggtgaatccgttagcgaggtgccgccggcttccattcaggtcgaggtggcccggctccatgcaccgcgacgcaacgcggggaggcagacaaggtatagggcggcgaggcggctacagccgatagtctggaacagcgcacttacgggttgctgcgcaacccaagtgctaccggcgcggcagcgtgacccgtgtcggcggctccaacggctcgccatcgtccagaaaacacggctcatcgggcatcggcaggcgctgctgcccgcgccgttcccattcctccgtttcggtcaaggctggcaggtctggttccatgcccggaatgccgggctggctgggcggctcctcgccggggccggtcggtagttgctgctcgcccggatacagggtcgggatgcggcgcaggtcgccatgccccaacagcgattcgtcctggtcgtcgtgatcaaccaccacggcggcactgaacaccgacaggcgcaactggtcgcggggctggccccacgccacgcggtcattgaccacgtaggccgacacggtgccggggccgttgagcttcacgacggagatccagcgctcggccaccaagtccttgactgcgtattggaccgtccgcaaagaacgtccgatgagcttggaaagtgtcttctggctgaccaccacggcgttctggtggcccatctgcgccacgaggtgatgcagcagcattg

SEQ ID NO: 78 - DNA, 14098 bp, artificial sequence
  Synthetic
ccgccgtgggtttcctcgcaataagcccggcccacgcctcatgcgctttgcgttccgtttgcacccagtgaccgggcttgttcttggcttgaatgccgatttctctggactgcgtggccatgcttatctccatgcggtaggggtgccgcacggttgcggcaccatgcgcaatcagctgcaacttttcggcagcgcgacaacaattatgcgttgcgtaaaagtggcagtcaattacagattttctttaacctacgcaatgagctattgcggggggtgccgcaatgagctgttgcgtaccccccttttttaagttgttgatttttaagtctttcgcatttcgccctatatctagttctttggtgcccaaagaagggcacccctgcggggttcccccacgccttcggcgcggctccccctccggcaaaaagtggcccctccggggcttgttgatcgactgcgcggccttcggccttgcccaaggtggcgctgcccccttggaacccccgcactcgccgccgtgaggctcggggggcaggcgggcgggcttcgcccttcgactgcccccactcgcataggcttgggtcgttccaggcgcgtcaaggccaagccgctgcgcggtcgctgcgcgagccttgacccgccttccacttggtgtccaaccggcaagcgaagcgcgcaggccgcaggccggaggcttttccccagagaaaattaaaaaaattgatggggcaaggccgcaggccgcgcagttggagccggtgggtatgtggtcgaaggctgggtagccggtgggcaatccctgtggtcaagctcgtgggcaggcgcagcctgtccatcagcttgtccagcagggttgtccacgggccgagcgaagcgagccagccggtggccgctcgcggccatcgtccacatatccacgggctggcaagggagcgcagcgaccgcgcagggcgaagcccggagagcaagcccgtagggcgccgcagccgccgtaggcggtcacgactttgcgaagcaaagtctagtgagtatactcaagcattgagtggcccgccggaggcaccgccttgcgctgcccccgtcgagccggttggacaccaaaagggaggggcaggcatggcggcatacgcgatcatgcgatgcaagaagctggcgaaaatgggcaacgtggcggccagtctcaagcacgcctaccgcgagcgcgagacgcccaacgctgacgccagcaggacgccagagaacgagcactgggcggccagcagcaccgatgaagcgatgggccgactgcgcgagttgctgccagagaagcggcgcaaggacgctgtgttggcggtcgagtacgtcatgacggccagcccggaatggtggaagtcggccagccaagaacagcaggcggcgttcttcgagaaggcgcacaagtggctggcggacaagtacggggcggatcgcatcgtgacggccagcatccaccgtgacgaaaccagcccgcacatgaccgcgttcgtggtgccgctgacgcaggacggcaggctgtcggccaaggagttcatcggcaacaaagcgcagatgacccgcgaccagaccacgtttgcggccgctgtggccgatctagggctgcaacggggcatcgagggcagcaaggcacgtcacacgcgcattcaggcgttctacgaggccctggagcggccaccagtgggccacgtcaccatcagcccgcaagcggtcgagccacgcgcctatgcaccgcagggattggccgaaaagctgggaatctcaaagcgcgttgagacgccggaagccgtggccgaccggctgacaaaagcggttcggcaggggtatgagcctgccctacaggccgccgcaggagcgcgtgagatgcgcaagaaggccgatcaagcccaagagacggcccgtgaccttcgggagcgcctgaagcccgttctggacgccctggggccgttgaatcgggatatgcaggccaaggccgccgcgatcatcaaggccgtgggcgaaaagctgctgacggaacagcgggaagtccagcgccagaaacaggcccagcgccagcaggaacgcgggcgcgcacatttccccgaaaagtgccacctgggatgaatgtcagctactgggctatctggacaagggaaaacgcaagcgcaaagagaaagcaggtagcttgcagtgggcttacatggcgatagctagactgggcggttttatggacagcaagcgaaccggaattgccagctggggcgccctctggtaaggttgggaagccctgcaaagtaaactggatggctttcttgccgccaaggatctgatggcgcaggggatcaagatctgatcaagagacaggatgaggatcgtttcgcatgattgaacaagatggattgcacgcaggttctccggccgcttgggtggagaggctattcggctatgactgggcacaacagacaatcggctgctctgatgccgccgtgttccggctgtcagcgcaggggcgcccggttctttttgtcaagaccgacctgtccggtgccctgaatgaactgcaagacgaggcagcgcggctatcgtggctggccacgacgggcgttccttgcgcagctgtgctcgacgttgtcactgaagcgggaagggactggctgctattgggcgaagtgccggggcaggatctcctgtcatctcaccttgctcctgccgagaaagtatccatcatggctgatgcaatgcggcggctgcatacgcttgatccggctacctgcccattcgaccaccaagcgaaacatcgcatcgagcgagcacgtactcggatggaagccggtcttgtcgatcaggatgatctggacgaagagcatcaggggctcgcgccagccgaactgttcgccaggctcaaggcgcgcatgcccgacggcgaggatctcgtcgtgacccatggcgatgcctgcttgccgaatatcatggtggaaaatggccgcttttctggattcatcgactgtggccggctgggtgtggcggaccgctatcaggacatagcgttggctacccgtgatattgctgaagagcttggcggcgaatgggctgaccgcttcctcgtgctttacggtatcgccgctcccgattcgcagcgcatcgccttctatcgccttcttgacgagttcttctgagcgggactctggggttcgaaatgaccgaccaagcgacgcccaacctgccatcacgagatttcgattccaccgccgccttctatgaaaggttgggcttcggaatcgttttccgggacgccggctggatgatcctccagcgcggggatctcatgctggagttcttcgcccacccccatgggcaaatattatacgcaaggcgacaaggtgctgatgccgctggcgattcaggttcatcatgccgtttgtgatggcttccatgtcggcagaatgcttaatgaattacaacagtttttatgcatgcgcccaatacgcaaaccgcctctccccgcgcgttggccgattcattaatgcagctggcacgacaggtttcccgactggtggataaccgtattaccgcctttgagtgagctgataccgctcgccgcagccgaacgaccgagcgcagcgagtcagtgagcgaggacacaagctttgacagctagctcagtcctaggtataatactagcgtcgacctttaataaggagatataccatgggtgaactgccgagtaggtagctgataacgcacgacctgccggaattcagcctgactgaaagtgaactgccgagtaggtagctgataactggcccagttggtcgagcatatcaacagaaccgtgaactgccgagtaggtagctgataacggatccgaattcgagcgaaggagatatacatatgtttttgcaaagacctaaaccttacagcgatgaaagtttagaaagtttctttatccgagtggctaacaaaaatggctacggtgatgtccatcgcttcctagaagccactaaacgattccttcaagacattgaccataatggctatcaaacctttccgactgatataactcggataaacccatactcagctaaaaacagttccagcgcacgaactgcgtcattcctgaaacttgcacaattgacatttaatgaaccgccagagctacttgggttggcaattaacagaacaaacatgaaatactcgccgtcaactagcgcggttgttagaggtgcagaagtctttcctcgcagtttactacggacgcactccatcccctgctgtcctttgtgtctgcgagaaaatggctacgcctcctacctttggcactttcaggggtacgaatactgccacagccataacgtacctttaattaccacttgtagctgtggtaaggagtttgactaccgagtatctgggttaaagggcatttgctgcaaatgcaaggagcctatcaccttaaccagcagggagaacggtcatgaggcagcgtgtactgtttcaaactggcttgctggccatgaatctaaacctctgccaaatcttcctaaaagctaccgatggggtttagttcattggtggatgggtattaaagatagcgagttcgatcacttttcgttcgttcaatttttctcaaactggccaaggtcattccactcgataatcgaagatgaagtagagttcaaccttgagcatgctgttgtcagcacgtctgaattacgactaaaagatcttcttggtcgattgtttttcggttcaattcggttacctgagcggaatcttcaacacaatatcatccttggtgagcttctctgctatttagaaaatcgtttatggcaagacaagggattaatcgccaacctcaaaatgaacgcgttagaggcgactgtaatgttaaattgtagcctcgatcagattgcatcaatggttgaacaacgcatcttgaagccaaatcgaaaaagcaagcccaacagccctcttgatgttaccgattatctatttcatttcggcgatattttctgtctttggttagctgagttccaaagcgatgagtttaaccgttcgttttatgtgtcgaggtggtaaatgcaaactctgaaagaactaatcgcatccaatcctgacgacttaacaactgaacttaagagagcatttcgtccactcacaccgcatattgcaattgatggtaatgaacttgacgcactgacgatattagtcaatttaaccgataagactgatgatcagaaagacctgctcgatcgagccaaatgcaagcaaaaacttcgagatgaaaaatggtgggctagctgcataaattgcgttaattacagacaaagccataacccaaaattcccggatatacgttctgaaggcgtgattcgaacccaagccctgggtgaattaccgagtttcctactctcgtcctcaaaaatcccaccataccattggtcatatagccatgattcaaaatacgtcaacaaaagcgcattcctcaccaatgagttttgttgggatggtgagatctcatgtttgggtgagcttcttaaagatgcagatcacccactttggaatactttgaaaaagttaggttgttctcaaaaaacttgcaaagcaatggcaaaacaactagctgatattactctcacgactatcaatgtcacactcgcaccaaattacctgactcaaatatctctccccgatagtgatacatcctacatttcactctctcctgttgcatcgctatcgatgcaaagccactttcatcagaggctccaagatgaaaatcggcatagcgcgataacgcggtttagccgaactaccaacatgggggtcactgcgatgacatgtggcggcgcatttagaatgttaaagtctggcgctaagttttccagcccccctcatcaccgattaaacagtaaacgaagttggttgacgtcagagcatgttcagtcattaaaacagtaccagcgcctcaacaaaagcctcatacctgaaaactctcggattgcactccgtagaaaatacaaaatcgagcttcaaaatatggtcagatcttggtttgcaatgcaagaccatacccttgattcgaacatacttatccaacatttgaatcatgacctatcttacttaggagccacaaaacgttttgcatacgatccagcgatgaccaagctctttactgagcttttgaaacgagagttatcaaattcaatcaataatggtgagcaacacactaatggatcgtttttagtcctaccgaatatcagggtttgtggcgcaacagctttaagctccccggtaacggtggggattccatcacttacagctttctttggcttcgttcacgcatttgaacggaatataaatcgcaccacctcatcgtttcgtgttgaatcctttgcgatatgcgtccatcaactacatgtcgagaagcgaggtttgacagcagagtttgtggaaaaaggcgacgggactatatccgctcccgcgacccgggatgactggcagtgtgatgtcgtatttagccttattttgaacaccaactttgctcaacatattgaccaagatacgttagttacatcactaccaaagcgattggctcggggttcagcaaaaattgcgattgatgactttaaacatatcaactcattctcgacattagaaacagcgatcgaatctctgccaatagaagctggtaggtggttatcactttacgcacagtcaaacaataatctaagtgatctattagcagccatgacagaggaccatcagctcatggcaagctgcgtcggttaccacttgttagaagagcccaaagataaaccaaactccctcagaggttacaaacacgctatcgccgagtgcatcattggactcattaactcaatcacctttagctcagagactgatcccaacacaatcttttggtcgctaaagaactatcaaaactacctagtggtacagccaaggagtatcaacgatgaaactaccgacaaatctagcctatgagcgctctatcgacccatcagatgtctgtttttttgtcgtctggcccgatgatagaaaaacacctttaacctacaattctcgtactctgctcgggcaaatggaagcggcatcattagcctatgatgtctcaggtcaaccaataaaaagtgccaccgctgaggcgttagctcaagggaaccctcatcaagttgatttctgccacgttccatacggtgcgagtcatattgaatgcagtttctccgtctcgttttcttctgaactacgtcaaccatataagtgtaactcaagcaaagttaaacaaacgctagtgcaattagtcgagctctacgaaacgaaaatcggctggactgagctagcaacccgatatttgatgaacatttgcaacggtaaatggctgtggaaaaatacccgtaaagcctattgctggaacattgtacttacaccttggccttggaacggggaaaaggttggatttgaagatattcgtactaactacacctcacggcaagactttaaaaataataaaaattggtctgctatagttgaaatgatcaaaaccgcattttctagtactgatgggctggcgatatttgaagtcagggccaccttgcacttgccaacgaatgctatggtgcggccaagccaagttttcacagaaaaagaaagtggcagtaaaagtaaatctaaaactcaaaacagtcgagtttttcagagtacaactattgatggtgaacgatcgccaatactaggggcctttaaaacgggagcagctattgcaaccattgacgactggtatcctgaagccactgagccactaagggtcggacggtttggggttcatcgcgaagatgtcacttgctaccgtcatccgtctaccggaaaagattttttctcgatattacaacaagcagagcactatattgaagtgttgagcgccaacaaaactcccgctcaagaaactatcaacgacatgcactttttaatggctaacctgattaagggtgggatgttccagcataaaggagactgactgtgaaatggtattataagacaatcacctttctgccagagttgtgcaacaacgagtcactggctgcaaagtgtctccgcgttctgcatggatttaactatcagtatgagacacgaaatatcggcgtttcatttccgctttggtgtgatgcaacggttggaaaaaagatttcatttgtcagcaagaacaagatagaactcgacttactacttaaacaacactatttcgtccaaatggaacaacttcaatactttcatatatccaacactgttctcgtcccagaagattgtacatacgtttcctttagacgctgtcaatctatagataagctcacagcagcagggctggcaaggaaaatcagacgcctggagaaacgtgctctatctagaggcgagcaatttgacccatcatcttttgctcaaaaagagcatactgcaatagcgcactaccactcacttggggagtccagcaaacagacgaaccgcaactttcgactcaatatcaggatgctctcggagcaaccccgtgaggggaactcgatttttagtagctatggcttatcaaattcagaaaactcgtttcagcctgtacccttaatctgacctttaataaggagatataccatggcgacaagtttacctacgccctcagcaattacgacttcggcgttagagtatgcattccatactcccgctcgcaatctaacgaaatctcgcggaaaaaacattcatcgttatgtcagtgtaaagatgagtaagaggattacggtagaatctactctagagtgtgatgcctgctatcactttgattttgagccaagtattgttcgcttttgcgctcaaccgattcgatttttatattatctcaatggtcagtctcactcctatgttcctgactttctagttcaatttgataccaacgagtttgttctatatgaagtaaagtcagcttatgctaagaacaaacctgattttgatgttgaatgggaggcgaaagtaaaagcagcaactgaactagggctagaattggagcttgttgaagagagtgatattagggatacggttgtattaaataatcttaagcgcatgcatcgttatgcttcgaaagatgagctgaataacgtacataactctctcttaaaaataataaagtacaatggcgcccaatctgcaagatgcttgggagaacagttgggtttaaaaggccgaactgttttaccaattttgtgcgatttgctgtcaaggtgtttactcgatacacgtttggataagcctctatctcttgaatctcgatttgagttggccagttatggctaagaaagggttctcaagtttccatagaaaagcagtctcttcccaagatacgcttgaatcgatagagcttgtctctagcgctaattgtctagaaagtgttacgtatcaagatatatcagcatttcccgaaacaattgcggtagagattaatttccgattaagcattcttcgctttttagcgcgaaagtgcgaaaccattgtggccaaatcaattgaaccacatcgtgtagagctacagcaaaactatagtagaaaaatacccagtgcaataacgatatatcgatggtggcttgcttttcgaaaatcagactacaaccccattagcttagcacctaatatcaaggatagaggtaatagagagacaaaagtgtcaacagttgttgattctattatggaacaggcagttgaaagagttatatctggacgaaaagtcaatgttagctctgcatataaacgtgttcgacgaaaagttcgtcaatacaatctaactcatggaacgaaatacacgtatcctaagtacgaatctgtaagaaagcgagtaaaaaagaaaaccccatttgagttattagccgcagggaaaggggagagagtagctaagagagagtttcgccgaatgggaaaaaagatcctcacgtctagcgtgctagagagggttgaaatagatcacactgtcgttgacctttttgcagtacacgaagagtatcgaatcccattgggccgaccttggcttactcaattggttgattgttacagtaaagctgtaatcggtttttatttaggtttcgagcctcctagctatgtgtcggtttcccttgcacttaagaatgcaatacaacgcaaagatgacttaatctcctcgtatgaatcgatcgagaatgaatggctatgttatggcatcccagacctactcgtaactgataatggtaaagagtttttgtcgaaagcatttgatcaagcatgtgaatcactattgatcaatgtgcatcaaaataaagttgagacgcccgacaacaaacctcatgttgaacgtaactacgggactattaatacttctctgttagacgatttacctgggaaatccttcagccagtaccttcaaagagaagggtacgactctgtgggagaagctacccttacactcaatgagattagagaaatttacttaatttggttggtggatatttatcataaaaaacccaatcagagaggcactaattgtcctaatgttgcgtggaaaaagggttgtcaagaatgggaaccagaggagttctctggttctaaagacgaattagactttaaatttgctattgttgattacaaacaacttactaaagtagggataactgtctacaaagaactgagttatagcaatgaccgtttagctgaatatagagggaagaaaggaaaccataaagttcagttcaagtataaccctgagtgtatggcagttatttgggtgttggatgaggatatgaatgagtactttacagttaatgcgattgactacgaatatgcaagtagagtatcactttggcaacataaatataacatgaaatatcaagcagaactaaattcagcagaatatgatgaggacaaggaaattgatgcagaaataaaaattgaagaaatcgcagatcgttcaattgttaagactaacaaaatcagagctcggaggcgtggcgctaggcatcaagagaatagcgcaagggctaagtcaatcagtaatgcgaacccggcctcgatacaaaaacatgaagatgaaatcgttagtgcagataatgacgattgggatattgattatgtctgagaaatcgtcaaatgagtgaaacgcgtgaggctcgtatatcaagagctaaaagggcatttgtatccacaccgagcgttaggaaaatcttgagttacatggatagatgtagagatctatcagacctagagtctgagcctacatgcatgatggtctatggtgcttcgggtgtaggtaaaacgaccgtcatcaagaaatacttaaatcaaaacagaagagagtccgaagccgggggcgatataataccggttttgcatattgagttgccagacaatgcgaagccagtagatgcagcaagggaattgctggttgaaatgggtgacccgctagcactttatgaaactgacttagctagattgacgaaaagactgactgaattaatccctgcggtcggcgtgaagctgattattatcgatgagttccaacatttggtggaagaaaggtcaaatcgggttcttacccaagtaggtaattggctaaaaatgatacttaacaaaacgaaatgtccaattgttatatttggtatgccatactcaaaagttgtactgcaagcaaactcgcaacttcacgggcgattttccattcaggttgaactgcgcccctttagctaccagggaggtagaggtgtatttaaaacttttttggaataccttgataaagccctaccttttgaaaaacaggctggcttagccaacgaaagtttgcagaaaaaattgtatgcattctctcagggaaacatgcgttcgttgagaaaccttatttatcaagcatctatcgaagcaattgataatcagcatgagacgataaccgaagaagatttcgtttttgcatcgaagttgacatcgggcgataaacccaactcatggaaaaatccttttgaggagggtgttgaggtaacagaagatatgttacgaccgccaccaaaagatattggttgggaggactatttgagacattcaaccccgagagtgagtaaaccaggtagaaataaaaactttttcgaataacctaggctgctgcgctgctgccaccgctgagcaataactagcataaccccttggggcctctaaacgggtcttgaggggttttttgctgaaacctcaggcatttgttgttgatacaaccataaaatgataattacacccataaattgataattatcacacccataaattgatattgcctcttcatggtctaaacttcagtaagtttacgacattttcctcgaggtcatttccggggatccatggagaaaaaaatcactggatataccaccgttgatatatcccaatggcatcgtaaagaacattttgaggcatttcagtcagttgctcaatgtacctataaccagaccgttcagctggatattacggcctttttaaagaccgtaaagaaaaataagcacaagttttatccggcctttattcacattcttgcccgcctgatgaatgctcatccggagttccgtatggcaatgaaagacggtgagctggtgatatgggatagtgttcacccttgttacaccgttttccatgagcaaactgaaacgttttcatcgctctggagtgaataccacgacgatttccggcagtttctacacatatattcgcaagatgtggcgtgttacggtgaaaacctggcctatttccctaaagggtttattgagaatatgtttttcgtctcagccaatccctgggtgagtttcaccagttttgatttaaacgtggccaatatggacaacttcttcgcccccgttttcactatgggcaaatattatacgcaaggcgacaaggtgctgatgccgctggcgattcaggttcatcatgccgtttgtgatggcttccatgtcggcagaatgcttaatgaattacaacagtactgcgatgagtggcagggcggggcgtaatttttttaaggcagttattggtgcccttctagagtccttactgcagtagttttgctgaaatactcgattcacaaaaatatcaacttatggttgttttgtgagatatcaatatatggttgttttgtggttaagttgctgattataaataattattaaatatcactttatggttgcatcaacaggtaccgagctcgaattcactggccgtcgttttacaacgtcgtgactgggaaaaccctggcgttacccaacttaatcgccttgcggccagtttgctcaggctctccccgtggaggtaataattgacgatatgatcatttattctgcctcccagagcctgataaaaacggtgaatccgttagcgaggtgccgccggcttccattcaggtcgaggtggcccggctccatgcaccgcgacgcaacgcggggaggcagacaaggtatagggcggcgaggcggctacagccgatagtctggaacagcgcacttacgggttgctgcgcaacccaagtgctaccggcgcggcagcgtgacccgtgtcggcggctccaacggctcgccatcgtccagaaaacacggctcatcgggcatcggcaggcgctgctgcccgcgccgttcccattcctccgtttcggtcaaggctggcaggtctggttccatgcccggaatgccgggctggctgggcggctcctcgccggggccggtcggtagttgctgctcgcccggatacagggtcgggatgcggcgcaggtcgccatgccccaacagcgattcgtcctggtcgtcgtgatcaaccaccacggcggcactgaacaccgacaggcgcaactggtcgcggggctggccccacgccacgcggtcattgaccacgtaggccgacacggtgccggggccgttgagcttcacgacggagatccagcgctcggccaccaagtccttgactgcgtattggaccgtccgcaaagaacgtccgatgagcttggaaagtgtcttctggctgaccaccacggcgttctggtggcccatctgcgccacgaggtgatgcagcagcattg

SEQ ID NO: 79 - DNA, 14130 bp, artificial sequence
  Synthetic
ccgccgtgggtttcctcgcaataagcccggcccacgcctcatgcgctttgcgttccgtttgcacccagtgaccgggcttgttcttggcttgaatgccgatttctctggactgcgtggccatgcttatctccatgcggtaggggtgccgcacggttgcggcaccatgcgcaatcagctgcaacttttcggcagcgcgacaacaattatgcgttgcgtaaaagtggcagtcaattacagattttctttaacctacgcaatgagctattgcggggggtgccgcaatgagctgttgcgtaccccccttttttaagttgttgatttttaagtctttcgcatttcgccctatatctagttctttggtgcccaaagaagggcacccctgcggggttcccccacgccttcggcgcggctccccctccggcaaaaagtggcccctccggggcttgttgatcgactgcgcggccttcggccttgcccaaggtggcgctgcccccttggaacccccgcactcgccgccgtgaggctcggggggcaggcgggcgggcttcgcccttcgactgcccccactcgcataggcttgggtcgttccaggcgcgtcaaggccaagccgctgcgcggtcgctgcgcgagccttgacccgccttccacttggtgtccaaccggcaagcgaagcgcgcaggccgcaggccggaggcttttccccagagaaaattaaaaaaattgatggggcaaggccgcaggccgcgcagttggagccggtgggtatgtggtcgaaggctgggtagccggtgggcaatccctgtggtcaagctcgtgggcaggcgcagcctgtccatcagcttgtccagcagggttgtccacgggccgagcgaagcgagccagccggtggccgctcgcggccatcgtccacatatccacgggctggcaagggagcgcagcgaccgcgcagggcgaagcccggagagcaagcccgtagggcgccgcagccgccgtaggcggtcacgactttgcgaagcaaagtctagtgagtatactcaagcattgagtggcccgccggaggcaccgccttgcgctgcccccgtcgagccggttggacaccaaaagggaggggcaggcatggcggcatacgcgatcatgcgatgcaagaagctggcgaaaatgggcaacgtggcggccagtctcaagcacgcctaccgcgagcgcgagacgcccaacgctgacgccagcaggacgccagagaacgagcactgggcggccagcagcaccgatgaagcgatgggccgactgcgcgagttgctgccagagaagcggcgcaaggacgctgtgttggcggtcgagtacgtcatgacggccagcccggaatggtggaagtcggccagccaagaacagcaggcggcgttcttcgagaaggcgcacaagtggctggcggacaagtacggggcggatcgcatcgtgacggccagcatccaccgtgacgaaaccagcccgcacatgaccgcgttcgtggtgccgctgacgcaggacggcaggctgtcggccaaggagttcatcggcaacaaagcgcagatgacccgcgaccagaccacgtttgcggccgctgtggccgatctagggctgcaacggggcatcgagggcagcaaggcacgtcacacgcgcattcaggcgttctacgaggccctggagcggccaccagtgggccacgtcaccatcagcccgcaagcggtcgagccacgcgcctatgcaccgcagggattggccgaaaagctgggaatctcaaagcgcgttgagacgccggaagccgtggccgaccggctgacaaaagcggttcggcaggggtatgagcctgccctacaggccgccgcaggagcgcgtgagatgcgcaagaaggccgatcaagcccaagagacggcccgtgaccttcgggagcgcctgaagcccgttctggacgccctggggccgttgaatcgggatatgcaggccaaggccgccgcgatcatcaaggccgtgggcgaaaagctgctgacggaacagcgggaagtccagcgccagaaacaggcccagcgccagcaggaacgcgggcgcgcacatttccccgaaaagtgccacctgggatgaatgtcagctactgggctatctggacaagggaaaacgcaagcgcaaagagaaagcaggtagcttgcagtgggcttacatggcgatagctagactgggcggttttatggacagcaagcgaaccggaattgccagctggggcgccctctggtaaggttgggaagccctgcaaagtaaactggatggctttcttgccgccaaggatctgatggcgcaggggatcaagatctgatcaagagacaggatgaggatcgtttcgcatgattgaacaagatggattgcacgcaggttctccggccgcttgggtggagaggctattcggctatgactgggcacaacagacaatcggctgctctgatgccgccgtgttccggctgtcagcgcaggggcgcccggttctttttgtcaagaccgacctgtccggtgccctgaatgaactgcaagacgaggcagcgcggctatcgtggctggccacgacgggcgttccttgcgcagctgtgctcgacgttgtcactgaagcgggaagggactggctgctattgggcgaagtgccggggcaggatctcctgtcatctcaccttgctcctgccgagaaagtatccatcatggctgatgcaatgcggcggctgcatacgcttgatccggctacctgcccattcgaccaccaagcgaaacatcgcatcgagcgagcacgtactcggatggaagccggtcttgtcgatcaggatgatctggacgaagagcatcaggggctcgcgccagccgaactgttcgccaggctcaaggcgcgcatgcccgacggcgaggatctcgtcgtgacccatggcgatgcctgcttgccgaatatcatggtggaaaatggccgcttttctggattcatcgactgtggccggctgggtgtggcggaccgctatcaggacatagcgttggctacccgtgatattgctgaagagcttggcggcgaatgggctgaccgcttcctcgtgctttacggtatcgccgctcccgattcgcagcgcatcgccttctatcgccttcttgacgagttcttctgagcgggactctggggttcgaaatgaccgaccaagcgacgcccaacctgccatcacgagatttcgattccaccgccgccttctatgaaaggttgggcttcggaatcgttttccgggacgccggctggatgatcctccagcgcggggatctcatgctggagttcttcgcccacccccatgggcaaatattatacgcaaggcgacaaggtgctgatgccgctggcgattcaggttcatcatgccgtttgtgatggcttccatgtcggcagaatgcttaatgaattacaacagtttttatgcatgcgcccaatacgcaaaccgcctctccccgcgcgttggccgattcattaatgcagctggcacgacaggtttcccgactggtggataaccgtattaccgcctttgagtgagctgataccgctcgccgcagccgaacgaccgagcgcagcgagtcagtgagcgaggacacaagctttgacagctagctcagtcctaggtataatactagcgtcgacgtggagatataccatgggtgaactgccgagtaggtagctgataacagtacagcgcggctgaaatcatcattaaagcggtgaactgccgagtaggtagctgataaccgagtttgtcagaaagcagaccaaacagcggtgtgaactgccgagtaggtagctgataacggatccgaattcgagcgaaggagatatacatatgtttttgcaaagacctaaaccttacagcgatgaaagtttagaaagtttctttatccgagtggctaacaaaaatggctacggtgatgtccatcgcttcctagaagccactaaacgattccttcaagacattgaccataatggctatcaaacctttccgactgatataactcggataaacccatactcagctaaaaacagttccagcgcacgaactgcgtcattcctgaaacttgcacaattgacatttaatgaaccgccagagctacttgggttggcaattaacagaacaaacatgaaatactcgccgtcaactagcgcggttgttagaggtgcagaagtctttcctcgcagtttactacggacgcactccatcccctgctgtcctttgtgtctgcgagaaaatggctacgcctcctacctttggcactttcaggggtacgaatactgccacagccataacgtacctttaattaccacttgtagctgtggtaaggagtttgactaccgagtatctgggttaaagggcatttgctgcaaatgcaaggagcctatcaccttaaccagcagggagaacggtcatgaggcagcgtgtactgtttcaaactggcttgctggccatgaatctaaacctctgccaaatcttcctaaaagctaccgatggggtttagttcattggtggatgggtattaaagatagcgagttcgatcacttttcgttcgttcaatttttctcaaactggccaaggtcattccactcgataatcgaagatgaagtagagttcaaccttgagcatgctgttgtcagcacgtctgaattacgactaaaagatcttcttggtcgattgtttttcggttcaattcggttacctgagcggaatcttcaacacaatatcatccttggtgagcttctctgctatttagaaaatcgtttatggcaagacaagggattaatcgccaacctcaaaatgaacgcgttagaggcgactgtaatgttaaattgtagcctcgatcagattgcatcaatggttgaacaacgcatcttgaagccaaatcgaaaaagcaagcccaacagccctcttgatgttaccgattatctatttcatttcggcgatattttctgtctttggttagctgagttccaaagcgatgagtttaaccgttcgttttatgtgtcgaggtggtaaatgcaaactctgaaagaactaatcgcatccaatcctgacgacttaacaactgaacttaagagagcatttcgtccactcacaccgcatattgcaattgatggtaatgaacttgacgcactgacgatattagtcaatttaaccgataagactgatgatcagaaagacctgctcgatcgagccaaatgcaagcaaaaacttcgagatgaaaaatggtgggctagctgcataaattgcgttaattacagacaaagccataacccaaaattcccggatatacgttctgaaggcgtgattcgaacccaagccctgggtgaattaccgagtttcctactctcgtcctcaaaaatcccaccataccattggtcatatagccatgattcaaaatacgtcaacaaaagcgcattcctcaccaatgagttttgttgggatggtgagatctcatgtttgggtgagcttcttaaagatgcagatcacccactttggaatactttgaaaaagttaggttgttctcaaaaaacttgcaaagcaatggcaaaacaactagctgatattactctcacgactatcaatgtcacactcgcaccaaattacctgactcaaatatctctccccgatagtgatacatcctacatttcactctctcctgttgcatcgctatcgatgcaaagccactttcatcagaggctccaagatgaaaatcggcatagcgcgataacgcggtttagccgaactaccaacatgggggtcactgcgatgacatgtggcggcgcatttagaatgttaaagtctggcgctaagttttccagcccccctcatcaccgattaaacagtaaacgaagttggttgacgtcagagcatgttcagtcattaaaacagtaccagcgcctcaacaaaagcctcatacctgaaaactctcggattgcactccgtagaaaatacaaaatcgagcttcaaaatatggtcagatcttggtttgcaatgcaagaccatacccttgattcgaacatacttatccaacatttgaatcatgacctatcttacttaggagccacaaaacgttttgcatacgatccagcgatgaccaagctctttactgagcttttgaaacgagagttatcaaattcaatcaataatggtgagcaacacactaatggatcgtttttagtcctaccgaatatcagggtttgtggcgcaacagctttaagctccccggtaacggtggggattccatcacttacagctttctttggcttcgttcacgcatttgaacggaatataaatcgcaccacctcatcgtttcgtgttgaatcctttgcgatatgcgtccatcaactacatgtcgagaagcgaggtttgacagcagagtttgtggaaaaaggcgacgggactatatccgctcccgcgacccgggatgactggcagtgtgatgtcgtatttagccttattttgaacaccaactttgctcaacatattgaccaagatacgttagttacatcactaccaaagcgattggctcggggttcagcaaaaattgcgattgatgactttaaacatatcaactcattctcgacattagaaacagcgatcgaatctctgccaatagaagctggtaggtggttatcactttacgcacagtcaaacaataatctaagtgatctattagcagccatgacagaggaccatcagctcatggcaagctgcgtcggttaccacttgttagaagagcccaaagataaaccaaactccctcagaggttacaaacacgctatcgccgagtgcatcattggactcattaactcaatcacctttagctcagagactgatcccaacacaatcttttggtcgctaaagaactatcaaaactacctagtggtacagccaaggagtatcaacgatgaaactaccgacaaatctagcctatgagcgctctatcgacccatcagatgtctgtttttttgtcgtctggcccgatgatagaaaaacacctttaacctacaattctcgtactctgctcgggcaaatggaagcggcatcattagcctatgatgtctcaggtcaaccaataaaaagtgccaccgctgaggcgttagctcaagggaaccctcatcaagttgatttctgccacgttccatacggtgcgagtcatattgaatgcagtttctccgtctcgttttcttctgaactacgtcaaccatataagtgtaactcaagcaaagttaaacaaacgctagtgcaattagtcgagctctacgaaacgaaaatcggctggactgagctagcaacccgatatttgatgaacatttgcaacggtaaatggctgtggaaaaatacccgtaaagcctattgctggaacattgtacttacaccttggccttggaacggggaaaaggttggatttgaagatattcgtactaactacacctcacggcaagactttaaaaataataaaaattggtctgctatagttgaaatgatcaaaaccgcattttctagtactgatgggctggcgatatttgaagtcagggccaccttgcacttgccaacgaatgctatggtgcggccaagccaagttttcacagaaaaagaaagtggcagtaaaagtaaatctaaaactcaaaacagtcgagtttttcagagtacaactattgatggtgaacgatcgccaatactaggggcctttaaaacgggagcagctattgcaaccattgacgactggtatcctgaagccactgagccactaagggtcggacggtttggggttcatcgcgaagatgtcacttgctaccgtcatccgtctaccggaaaagattttttctcgatattacaacaagcagagcactatattgaagtgttgagcgccaacaaaactcccgctcaagaaactatcaacgacatgcactttttaatggctaacctgattaagggtgggatgttccagcataaaggagactgactgtgaaatggtattataagacaatcacctttctgccagagttgtgcaacaacgagtcactggctgcaaagtgtctccgcgttctgcatggatttaactatcagtatgagacacgaaatatcggcgtttcatttccgctttggtgtgatgcaacggttggaaaaaagatttcatttgtcagcaagaacaagatagaactcgacttactacttaaacaacactatttcgtccaaatggaacaacttcaatactttcatatatccaacactgttctcgtcccagaagattgtacatacgtttcctttagacgctgtcaatctatagataagctcacagcagcagggctggcaaggaaaatcagacgcctggagaaacgtgctctatctagaggcgagcaatttgacccatcatcttttgctcaaaaagagcatactgcaatagcgcactaccactcacttggggagtccagcaaacagacgaaccgcaactttcgactcaatatcaggatgctctcggagcaaccccgtgaggggaactcgatttttagtagctatggcttatcaaattcagaaaactcgtttcagcctgtacccttaatctgacctttaataaggagatataccatggcgacaagtttacctacgccctcagcaattacgacttcggcgttagagtatgcattccatactcccgctcgcaatctaacgaaatctcgcggaaaaaacattcatcgttatgtcagtgtaaagatgagtaagaggattacggtagaatctactctagagtgtgatgcctgctatcactttgattttgagccaagtattgttcgcttttgcgctcaaccgattcgatttttatattatctcaatggtcagtctcactcctatgttcctgactttctagttcaatttgataccaacgagtttgttctatatgaagtaaagtcagcttatgctaagaacaaacctgattttgatgttgaatgggaggcgaaagtaaaagcagcaactgaactagggctagaattggagcttgttgaagagagtgatattagggatacggttgtattaaataatcttaagcgcatgcatcgttatgcttcgaaagatgagctgaataacgtacataactctctcttaaaaataataaagtacaatggcgcccaatctgcaagatgcttgggagaacagttgggtttaaaaggccgaactgttttaccaattttgtgcgatttgctgtcaaggtgtttactcgatacacgtttggataagcctctatctcttgaatctcgatttgagttggccagttatggctaagaaagggttctcaagtttccatagaaaagcagtctcttcccaagatacgcttgaatcgatagagcttgtctctagcgctaattgtctagaaagtgttacgtatcaagatatatcagcatttcccgaaacaattgcggtagagattaatttccgattaagcattcttcgctttttagcgcgaaagtgcgaaaccattgtggccaaatcaattgaaccacatcgtgtagagctacagcaaaactatagtagaaaaatacccagtgcaataacgatatatcgatggtggcttgcttttcgaaaatcagactacaaccccattagcttagcacctaatatcaaggatagaggtaatagagagacaaaagtgtcaacagttgttgattctattatggaacaggcagttgaaagagttatatctggacgaaaagtcaatgttagctctgcatataaacgtgttcgacgaaaagttcgtcaatacaatctaactcatggaacgaaatacacgtatcctaagtacgaatctgtaagaaagcgagtaaaaaagaaaaccccatttgagttattagccgcagggaaaggggagagagtagctaagagagagtttcgccgaatgggaaaaaagatcctcacgtctagcgtgctagagagggttgaaatagatcacactgtcgttgacctttttgcagtacacgaagagtatcgaatcccattgggccgaccttggcttactcaattggttgattgttacagtaaagctgtaatcggtttttatttaggtttcgagcctcctagctatgtgtcggtttcccttgcacttaagaatgcaatacaacgcaaagatgacttaatctcctcgtatgaatcgatcgagaatgaatggctatgttatggcatcccagacctactcgtaactgataatggtaaagagtttttgtcgaaagcatttgatcaagcatgtgaatcactattgatcaatgtgcatcaaaataaagttgagacgcccgacaacaaacctcatgttgaacgtaactacgggactattaatacttctctgttagacgatttacctgggaaatccttcagccagtaccttcaaagagaagggtacgactctgtgggagaagctacccttacactcaatgagattagagaaatttacttaatttggttggtggatatttatcataaaaaacccaatcagagaggcactaattgtcctaatgttgcgtggaaaaagggttgtcaagaatgggaaccagaggagttctctggttctaaagacgaattagactttaaatttgctattgttgattacaaacaacttactaaagtagggataactgtctacaaagaactgagttatagcaatgaccgtttagctgaatatagagggaagaaaggaaaccataaagttcagttcaagtataaccctgagtgtatggcagttatttgggtgttggatgaggatatgaatgagtactttacagttaatgcgattgactacgaatatgcaagtagagtatcactttggcaacataaatataacatgaaatatcaagcagaactaaattcagcagaatatgatgaggacaaggaaattgatgcagaaataaaaattgaagaaatcgcagatcgttcaattgttaagactaacaaaatcagagctcggaggcgtggcgctaggcatcaagagaatagcgcaagggctaagtcaatcagtaatgcgaacccggcctcgatacaaaaacatgaagatgaaatcgttagtgcagataatgacgattgggatattgattatgtctgagaaatcgtcaaatgagtgaaacgcgtgaggctcgtatatcaagagctaaaagggcatttgtatccacaccgagcgttaggaaaatcttgagttacatggatagatgtagagatctatcagacctagagtctgagcctacatgcatgatggtctatggtgcttcgggtgtaggtaaaacgaccgtcatcaagaaatacttaaatcaaaacagaagagagtccgaagccgggggcgatataataccggttttgcatattgagttgccagacaatgcgaagccagtagatgcagcaagggaattgctggttgaaatgggtgacccgctagcactttatgaaactgacttagctagattgacgaaaagactgactgaattaatccctgcggtcggcgtgaagctgattattatcgatgagttccaacatttggtggaagaaaggtcaaatcgggttcttacccaagtaggtaattggctaaaaatgatacttaacaaaacgaaatgtccaattgttatatttggtatgccatactcaaaagttgtactgcaagcaaactcgcaacttcacgggcgattttccattcaggttgaactgcgcccctttagctaccagggaggtagaggtgtatttaaaacttttttggaataccttgataaagccctaccttttgaaaaacaggctggcttagccaacgaaagtttgcagaaaaaattgtatgcattctctcagggaaacatgcgttcgttgagaaaccttatttatcaagcatctatcgaagcaattgataatcagcatgagacgataaccgaagaagatttcgtttttgcatcgaagttgacatcgggcgataaacccaactcatggaaaaatccttttgaggagggtgttgaggtaacagaagatatgttacgaccgccaccaaaagatattggttgggaggactatttgagacattcaaccccgagagtgagtaaaccaggtagaaataaaaactttttcgaataacctaggctgctgcgctgctgccaccgctgagcaataactagcataaccccttggggcctctaaacgggtcttgaggggttttttgctgaaacctcaggcatttgttgttgatacaaccataaaatgataattacacccataaattgataattatcacacccataaattgatattgcctcttcatggtctaaacttcagtaagtttacgacattttcctcgagataacttcgtatagcatacattatacgaagttattcgaggtcatttccggggatccatggagaaaaaaatcactggatataccaccgttgatatatcccaatggcatcgtaaagaacattttgaggcatttcagtcagttgctcaatgtacctataaccagaccgttcagctggatattacggcctttttaaagaccgtaaagaaaaataagcacaagttttatccggcctttattcacattcttgcccgcctgatgaatgctcatccggagttccgtatggcaatgaaagacggtgagctggtgatatgggatagtgttcacccttgttacaccgttttccatgagcaaactgaaacgttttcatcgctctggagtgaataccacgacgatttccggcagtttctacacatatattcgcaagatgtggcgtgttacggtgaaaacctggcctatttccctaaagggtttattgagaatatgtttttcgtctcagccaatccctgggtgagtttcaccagttttgatttaaacgtggccaatatggacaacttcttcgcccccgttttcactatgggcaaatattatacgcaaggcgacaaggtgctgatgccgctggcgattcaggttcatcatgccgtttgtgatggcttccatgtcggcagaatgcttaatgaattacaacagtactgcgatgagtggcagggcggggcgtaatttttttaaggcagttattggtgcccttctagagtccttactgcagtagttttgctgaaatactcgattcacaaaaatatcaacttatggttgttttgtgagatatcaatatatggttgttttgtggttaagttgctgattataaataattattaaatatcactttatggttgcatcaacaggtaccgagctcgaattcactggccgtcgttttacaacgtcgtgactgggaaaaccctggcgttacccaacttaatcgccttgcggccagtttgctcaggctctccccgtggaggtaataattgacgatatgatcatttattctgcctcccagagcctgataaaaacggtgaatccgttagcgaggtgccgccggcttccattcaggtcgaggtggcccggctccatgcaccgcgacgcaacgcggggaggcagacaaggtatagggcggcgaggcggctacagccgatagtctggaacagcgcacttacgggttgctgcgcaacccaagtgctaccggcgcggcagcgtgacccgtgtcggcggctccaacggctcgccatcgtccagaaaacacggctcatcgggcatcggcaggcgctgctgcccgcgccgttcccattcctccgtttcggtcaaggctggcaggtctggttccatgcccggaatgccgggctggctgggcggctcctcgccggggccggtcggtagttgctgctcgcccggatacagggtcgggatgcggcgcaggtcgccatgccccaacagcgattcgtcctggtcgtcgtgatcaaccaccacggcggcactgaacaccgacaggcgcaactggtcgcggggctggccccacgccacgcggtcattgaccacgtaggccgacacggtgccggggccgttgagcttcacgacggagatccagcgctcggccaccaagtccttgactgcgtattggaccgtccgcaaagaacgtccgatgagcttggaaagtgtcttctggctgaccaccacggcgttctggtggcccatctgcgccacgaggtgatgcagcagcattg

SEQ ID NO: 80 - DNA, 14130 bp, artificial sequence
  Synthetic
ccgccgtgggtttcctcgcaataagcccggcccacgcctcatgcgctttgcgttccgtttgcacccagtgaccgggcttgttcttggcttgaatgccgatttctctggactgcgtggccatgcttatctccatgcggtaggggtgccgcacggttgcggcaccatgcgcaatcagctgcaacttttcggcagcgcgacaacaattatgcgttgcgtaaaagtggcagtcaattacagattttctttaacctacgcaatgagctattgcggggggtgccgcaatgagctgttgcgtaccccccttttttaagttgttgatttttaagtctttcgcatttcgccctatatctagttctttggtgcccaaagaagggcacccctgcggggttcccccacgccttcggcgcggctccccctccggcaaaaagtggcccctccggggcttgttgatcgactgcgcggccttcggccttgcccaaggtggcgctgcccccttggaacccccgcactcgccgccgtgaggctcggggggcaggcgggcgggcttcgcccttcgactgcccccactcgcataggcttgggtcgttccaggcgcgtcaaggccaagccgctgcgcggtcgctgcgcgagccttgacccgccttccacttggtgtccaaccggcaagcgaagcgcgcaggccgcaggccggaggcttttccccagagaaaattaaaaaaattgatggggcaaggccgcaggccgcgcagttggagccggtgggtatgtggtcgaaggctgggtagccggtgggcaatccctgtggtcaagctcgtgggcaggcgcagcctgtccatcagcttgtccagcagggttgtccacgggccgagcgaagcgagccagccggtggccgctcgcggccatcgtccacatatccacgggctggcaagggagcgcagcgaccgcgcagggcgaagcccggagagcaagcccgtagggcgccgcagccgccgtaggcggtcacgactttgcgaagcaaagtctagtgagtatactcaagcattgagtggcccgccggaggcaccgccttgcgctgcccccgtcgagccggttggacaccaaaagggaggggcaggcatggcggcatacgcgatcatgcgatgcaagaagctggcgaaaatgggcaacgtggcggccagtctcaagcacgcctaccgcgagcgcgagacgcccaacgctgacgccagcaggacgccagagaacgagcactgggcggccagcagcaccgatgaagcgatgggccgactgcgcgagttgctgccagagaagcggcgcaaggacgctgtgttggcggtcgagtacgtcatgacggccagcccggaatggtggaagtcggccagccaagaacagcaggcggcgttcttcgagaaggcgcacaagtggctggcggacaagtacggggcggatcgcatcgtgacggccagcatccaccgtgacgaaaccagcccgcacatgaccgcgttcgtggtgccgctgacgcaggacggcaggctgtcggccaaggagttcatcggcaacaaagcgcagatgacccgcgaccagaccacgtttgcggccgctgtggccgatctagggctgcaacggggcatcgagggcagcaaggcacgtcacacgcgcattcaggcgttctacgaggccctggagcggccaccagtgggccacgtcaccatcagcccgcaagcggtcgagccacgcgcctatgcaccgcagggattggccgaaaagctgggaatctcaaagcgcgttgagacgccggaagccgtggccgaccggctgacaaaagcggttcggcaggggtatgagcctgccctacaggccgccgcaggagcgcgtgagatgcgcaagaaggccgatcaagcccaagagacggcccgtgaccttcgggagcgcctgaagcccgttctggacgccctggggccgttgaatcgggatatgcaggccaaggccgccgcgatcatcaaggccgtgggcgaaaagctgctgacggaacagcgggaagtccagcgccagaaacaggcccagcgccagcaggaacgcgggcgcgcacatttccccgaaaagtgccacctgggatgaatgtcagctactgggctatctggacaagggaaaacgcaagcgcaaagagaaagcaggtagcttgcagtgggcttacatggcgatagctagactgggcggttttatggacagcaagcgaaccggaattgccagctggggcgccctctggtaaggttgggaagccctgcaaagtaaactggatggctttcttgccgccaaggatctgatggcgcaggggatcaagatctgatcaagagacaggatgaggatcgtttcgcatgattgaacaagatggattgcacgcaggttctccggccgcttgggtggagaggctattcggctatgactgggcacaacagacaatcggctgctctgatgccgccgtgttccggctgtcagcgcaggggcgcccggttctttttgtcaagaccgacctgtccggtgccctgaatgaactgcaagacgaggcagcgcggctatcgtggctggccacgacgggcgttccttgcgcagctgtgctcgacgttgtcactgaagcgggaagggactggctgctattgggcgaagtgccggggcaggatctcctgtcatctcaccttgctcctgccgagaaagtatccatcatggctgatgcaatgcggcggctgcatacgcttgatccggctacctgcccattcgaccaccaagcgaaacatcgcatcgagcgagcacgtactcggatggaagccggtcttgtcgatcaggatgatctggacgaagagcatcaggggctcgcgccagccgaactgttcgccaggctcaaggcgcgcatgcccgacggcgaggatctcgtcgtgacccatggcgatgcctgcttgccgaatatcatggtggaaaatggccgcttttctggattcatcgactgtggccggctgggtgtggcggaccgctatcaggacatagcgttggctacccgtgatattgctgaagagcttggcggcgaatgggctgaccgcttcctcgtgctttacggtatcgccgctcccgattcgcagcgcatcgccttctatcgccttcttgacgagttcttctgagcgggactctggggttcgaaatgaccgaccaagcgacgcccaacctgccatcacgagatttcgattccaccgccgccttctatgaaaggttgggcttcggaatcgttttccgggacgccggctggatgatcctccagcgcggggatctcatgctggagttcttcgcccacccccatgggcaaatattatacgcaaggcgacaaggtgctgatgccgctggcgattcaggttcatcatgccgtttgtgatggcttccatgtcggcagaatgcttaatgaattacaacagtttttatgcatgcgcccaatacgcaaaccgcctctccccgcgcgttggccgattcattaatgcagctggcacgacaggtttcccgactggtggataaccgtattaccgcctttgagtgagctgataccgctcgccgcagccgaacgaccgagcgcagcgagtcagtgagcgaggacacaagctttgacagctagctcagtcctaggtataatactagcgtcgacgtggagatataccatgggtgaactgccgagtaggtagctgataacagtacagcgcggctgaaatcatcattaaagcggtgaactgccgagtaggtagctgataacggtttggtcgcaatgccaaactggcggtgctggtgaactgccgagtaggtagctgataacggatccgaattcgagcgaaggagatatacatatgtttttgcaaagacctaaaccttacagcgatgaaagtttagaaagtttctttatccgagtggctaacaaaaatggctacggtgatgtccatcgcttcctagaagccactaaacgattccttcaagacattgaccataatggctatcaaacctttccgactgatataactcggataaacccatactcagctaaaaacagttccagcgcacgaactgcgtcattcctgaaacttgcacaattgacatttaatgaaccgccagagctacttgggttggcaattaacagaacaaacatgaaatactcgccgtcaactagcgcggttgttagaggtgcagaagtctttcctcgcagtttactacggacgcactccatcccctgctgtcctttgtgtctgcgagaaaatggctacgcctcctacctttggcactttcaggggtacgaatactgccacagccataacgtacctttaattaccacttgtagctgtggtaaggagtttgactaccgagtatctgggttaaagggcatttgctgcaaatgcaaggagcctatcaccttaaccagcagggagaacggtcatgaggcagcgtgtactgtttcaaactggcttgctggccatgaatctaaacctctgccaaatcttcctaaaagctaccgatggggtttagttcattggtggatgggtattaaagatagcgagttcgatcacttttcgttcgttcaatttttctcaaactggccaaggtcattccactcgataatcgaagatgaagtagagttcaaccttgagcatgctgttgtcagcacgtctgaattacgactaaaagatcttcttggtcgattgtttttcggttcaattcggttacctgagcggaatcttcaacacaatatcatccttggtgagcttctctgctatttagaaaatcgtttatggcaagacaagggattaatcgccaacctcaaaatgaacgcgttagaggcgactgtaatgttaaattgtagcctcgatcagattgcatcaatggttgaacaacgcatcttgaagccaaatcgaaaaagcaagcccaacagccctcttgatgttaccgattatctatttcatttcggcgatattttctgtctttggttagctgagttccaaagcgatgagtttaaccgttcgttttatgtgtcgaggtggtaaatgcaaactctgaaagaactaatcgcatccaatcctgacgacttaacaactgaacttaagagagcatttcgtccactcacaccgcatattgcaattgatggtaatgaacttgacgcactgacgatattagtcaatttaaccgataagactgatgatcagaaagacctgctcgatcgagccaaatgcaagcaaaaacttcgagatgaaaaatggtgggctagctgcataaattgcgttaattacagacaaagccataacccaaaattcccggatatacgttctgaaggcgtgattcgaacccaagccctgggtgaattaccgagtttcctactctcgtcctcaaaaatcccaccataccattggtcatatagccatgattcaaaatacgtcaacaaaagcgcattcctcaccaatgagttttgttgggatggtgagatctcatgtttgggtgagcttcttaaagatgcagatcacccactttggaatactttgaaaaagttaggttgttctcaaaaaacttgcaaagcaatggcaaaacaactagctgatattactctcacgactatcaatgtcacactcgcaccaaattacctgactcaaatatctctccccgatagtgatacatcctacatttcactctctcctgttgcatcgctatcgatgcaaagccactttcatcagaggctccaagatgaaaatcggcatagcgcgataacgcggtttagccgaactaccaacatgggggtcactgcgatgacatgtggcggcgcatttagaatgttaaagtctggcgctaagttttccagcccccctcatcaccgattaaacagtaaacgaagttggttgacgtcagagcatgttcagtcattaaaacagtaccagcgcctcaacaaaagcctcatacctgaaaactctcggattgcactccgtagaaaatacaaaatcgagcttcaaaatatggtcagatcttggtttgcaatgcaagaccatacccttgattcgaacatacttatccaacatttgaatcatgacctatcttacttaggagccacaaaacgttttgcatacgatccagcgatgaccaagctctttactgagcttttgaaacgagagttatcaaattcaatcaataatggtgagcaacacactaatggatcgtttttagtcctaccgaatatcagggtttgtggcgcaacagctttaagctccccggtaacggtggggattccatcacttacagctttctttggcttcgttcacgcatttgaacggaatataaatcgcaccacctcatcgtttcgtgttgaatcctttgcgatatgcgtccatcaactacatgtcgagaagcgaggtttgacagcagagtttgtggaaaaaggcgacgggactatatccgctcccgcgacccgggatgactggcagtgtgatgtcgtatttagccttattttgaacaccaactttgctcaacatattgaccaagatacgttagttacatcactaccaaagcgattggctcggggttcagcaaaaattgcgattgatgactttaaacatatcaactcattctcgacattagaaacagcgatcgaatctctgccaatagaagctggtaggtggttatcactttacgcacagtcaaacaataatctaagtgatctattagcagccatgacagaggaccatcagctcatggcaagctgcgtcggttaccacttgttagaagagcccaaagataaaccaaactccctcagaggttacaaacacgctatcgccgagtgcatcattggactcattaactcaatcacctttagctcagagactgatcccaacacaatcttttggtcgctaaagaactatcaaaactacctagtggtacagccaaggagtatcaacgatgaaactaccgacaaatctagcctatgagcgctctatcgacccatcagatgtctgtttttttgtcgtctggcccgatgatagaaaaacacctttaacctacaattctcgtactctgctcgggcaaatggaagcggcatcattagcctatgatgtctcaggtcaaccaataaaaagtgccaccgctgaggcgttagctcaagggaaccctcatcaagttgatttctgccacgttccatacggtgcgagtcatattgaatgcagtttctccgtctcgttttcttctgaactacgtcaaccatataagtgtaactcaagcaaagttaaacaaacgctagtgcaattagtcgagctctacgaaacgaaaatcggctggactgagctagcaacccgatatttgatgaacatttgcaacggtaaatggctgtggaaaaatacccgtaaagcctattgctggaacattgtacttacaccttggccttggaacggggaaaaggttggatttgaagatattcgtactaactacacctcacggcaagactttaaaaataataaaaattggtctgctatagttgaaatgatcaaaaccgcattttctagtactgatgggctggcgatatttgaagtcagggccaccttgcacttgccaacgaatgctatggtgcggccaagccaagttttcacagaaaaagaaagtggcagtaaaagtaaatctaaaactcaaaacagtcgagtttttcagagtacaactattgatggtgaacgatcgccaatactaggggcctttaaaacgggagcagctattgcaaccattgacgactggtatcctgaagccactgagccactaagggtcggacggtttggggttcatcgcgaagatgtcacttgctaccgtcatccgtctaccggaaaagattttttctcgatattacaacaagcagagcactatattgaagtgttgagcgccaacaaaactcccgctcaagaaactatcaacgacatgcactttttaatggctaacctgattaagggtgggatgttccagcataaaggagactgactgtgaaatggtattataagacaatcacctttctgccagagttgtgcaacaacgagtcactggctgcaaagtgtctccgcgttctgcatggatttaactatcagtatgagacacgaaatatcggcgtttcatttccgctttggtgtgatgcaacggttggaaaaaagatttcatttgtcagcaagaacaagatagaactcgacttactacttaaacaacactatttcgtccaaatggaacaacttcaatactttcatatatccaacactgttctcgtcccagaagattgtacatacgtttcctttagacgctgtcaatctatagataagctcacagcagcagggctggcaaggaaaatcagacgcctggagaaacgtgctctatctagaggcgagcaatttgacccatcatcttttgctcaaaaagagcatactgcaatagcgcactaccactcacttggggagtccagcaaacagacgaaccgcaactttcgactcaatatcaggatgctctcggagcaaccccgtgaggggaactcgatttttagtagctatggcttatcaaattcagaaaactcgtttcagcctgtacccttaatctgacctttaataaggagatataccatggcgacaagtttacctacgccctcagcaattacgacttcggcgttagagtatgcattccatactcccgctcgcaatctaacgaaatctcgcggaaaaaacattcatcgttatgtcagtgtaaagatgagtaagaggattacggtagaatctactctagagtgtgatgcctgctatcactttgattttgagccaagtattgttcgcttttgcgctcaaccgattcgatttttatattatctcaatggtcagtctcactcctatgttcctgactttctagttcaatttgataccaacgagtttgttctatatgaagtaaagtcagcttatgctaagaacaaacctgattttgatgttgaatgggaggcgaaagtaaaagcagcaactgaactagggctagaattggagcttgttgaagagagtgatattagggatacggttgtattaaataatcttaagcgcatgcatcgttatgcttcgaaagatgagctgaataacgtacataactctctcttaaaaataataaagtacaatggcgcccaatctgcaagatgcttgggagaacagttgggtttaaaaggccgaactgttttaccaattttgtgcgatttgctgtcaaggtgtttactcgatacacgtttggataagcctctatctcttgaatctcgatttgagttggccagttatggctaagaaagggttctcaagtttccatagaaaagcagtctcttcccaagatacgcttgaatcgatagagcttgtctctagcgctaattgtctagaaagtgttacgtatcaagatatatcagcatttcccgaaacaattgcggtagagattaatttccgattaagcattcttcgctttttagcgcgaaagtgcgaaaccattgtggccaaatcaattgaaccacatcgtgtagagctacagcaaaactatagtagaaaaatacccagtgcaataacgatatatcgatggtggcttgcttttcgaaaatcagactacaaccccattagcttagcacctaatatcaaggatagaggtaatagagagacaaaagtgtcaacagttgttgattctattatggaacaggcagttgaaagagttatatctggacgaaaagtcaatgttagctctgcatataaacgtgttcgacgaaaagttcgtcaatacaatctaactcatggaacgaaatacacgtatcctaagtacgaatctgtaagaaagcgagtaaaaaagaaaaccccatttgagttattagccgcagggaaaggggagagagtagctaagagagagtttcgccgaatgggaaaaaagatcctcacgtctagcgtgctagagagggttgaaatagatcacactgtcgttgacctttttgcagtacacgaagagtatcgaatcccattgggccgaccttggcttactcaattggttgattgttacagtaaagctgtaatcggtttttatttaggtttcgagcctcctagctatgtgtcggtttcccttgcacttaagaatgcaatacaacgcaaagatgacttaatctcctcgtatgaatcgatcgagaatgaatggctatgttatggcatcccagacctactcgtaactgataatggtaaagagtttttgtcgaaagcatttgatcaagcatgtgaatcactattgatcaatgtgcatcaaaataaagttgagacgcccgacaacaaacctcatgttgaacgtaactacgggactattaatacttctctgttagacgatttacctgggaaatccttcagccagtaccttcaaagagaagggtacgactctgtgggagaagctacccttacactcaatgagattagagaaatttacttaatttggttggtggatatttatcataaaaaacccaatcagagaggcactaattgtcctaatgttgcgtggaaaaagggttgtcaagaatgggaaccagaggagttctctggttctaaagacgaattagactttaaatttgctattgttgattacaaacaacttactaaagtagggataactgtctacaaagaactgagttatagcaatgaccgtttagctgaatatagagggaagaaaggaaaccataaagttcagttcaagtataaccctgagtgtatggcagttatttgggtgttggatgaggatatgaatgagtactttacagttaatgcgattgactacgaatatgcaagtagagtatcactttggcaacataaatataacatgaaatatcaagcagaactaaattcagcagaatatgatgaggacaaggaaattgatgcagaaataaaaattgaagaaatcgcagatcgttcaattgttaagactaacaaaatcagagctcggaggcgtggcgctaggcatcaagagaatagcgcaagggctaagtcaatcagtaatgcgaacccggcctcgatacaaaaacatgaagatgaaatcgttagtgcagataatgacgattgggatattgattatgtctgagaaatcgtcaaatgagtgaaacgcgtgaggctcgtatatcaagagctaaaagggcatttgtatccacaccgagcgttaggaaaatcttgagttacatggatagatgtagagatctatcagacctagagtctgagcctacatgcatgatggtctatggtgcttcgggtgtaggtaaaacgaccgtcatcaagaaatacttaaatcaaaacagaagagagtccgaagccgggggcgatataataccggttttgcatattgagttgccagacaatgcgaagccagtagatgcagcaagggaattgctggttgaaatgggtgacccgctagcactttatgaaactgacttagctagattgacgaaaagactgactgaattaatccctgcggtcggcgtgaagctgattattatcgatgagttccaacatttggtggaagaaaggtcaaatcgggttcttacccaagtaggtaattggctaaaaatgatacttaacaaaacgaaatgtccaattgttatatttggtatgccatactcaaaagttgtactgcaagcaaactcgcaacttcacgggcgattttccattcaggttgaactgcgcccctttagctaccagggaggtagaggtgtatttaaaacttttttggaataccttgataaagccctaccttttgaaaaacaggctggcttagccaacgaaagtttgcagaaaaaattgtatgcattctctcagggaaacatgcgttcgttgagaaaccttatttatcaagcatctatcgaagcaattgataatcagcatgagacgataaccgaagaagatttcgtttttgcatcgaagttgacatcgggcgataaacccaactcatggaaaaatccttttgaggagggtgttgaggtaacagaagatatgttacgaccgccaccaaaagatattggttgggaggactatttgagacattcaaccccgagagtgagtaaaccaggtagaaataaaaactttttcgaataacctaggctgctgcgctgctgccaccgctgagcaataactagcataaccccttggggcctctaaacgggtcttgaggggttttttgctgaaacctcaggcatttgttgttgatacaaccataaaatgataattacacccataaattgataattatcacacccataaattgatattgcctcttcatggtctaaacttcagtaagtttacgacattttcctcgagataacttcgtatagcatacattatacgaagttattcgaggtcatttccggggatccatggagaaaaaaatcactggatataccaccgttgatatatcccaatggcatcgtaaagaacattttgaggcatttcagtcagttgctcaatgtacctataaccagaccgttcagctggatattacggcctttttaaagaccgtaaagaaaaataagcacaagttttatccggcctttattcacattcttgcccgcctgatgaatgctcatccggagttccgtatggcaatgaaagacggtgagctggtgatatgggatagtgttcacccttgttacaccgttttccatgagcaaactgaaacgttttcatcgctctggagtgaataccacgacgatttccggcagtttctacacatatattcgcaagatgtggcgtgttacggtgaaaacctggcctatttccctaaagggtttattgagaatatgtttttcgtctcagccaatccctgggtgagtttcaccagttttgatttaaacgtggccaatatggacaacttcttcgcccccgttttcactatgggcaaatattatacgcaaggcgacaaggtgctgatgccgctggcgattcaggttcatcatgccgtttgtgatggcttccatgtcggcagaatgcttaatgaattacaacagtactgcgatgagtggcagggcggggcgtaatttttttaaggcagttattggtgcccttctagagtccttactgcagtagttttgctgaaatactcgattcacaaaaatatcaacttatggttgttttgtgagatatcaatatatggttgttttgtggttaagttgctgattataaataattattaaatatcactttatggttgcatcaacaggtaccgagctcgaattcactggccgtcgttttacaacgtcgtgactgggaaaaccctggcgttacccaacttaatcgccttgcggccagtttgctcaggctctccccgtggaggtaataattgacgatatgatcatttattctgcctcccagagcctgataaaaacggtgaatccgttagcgaggtgccgccggcttccattcaggtcgaggtggcccggctccatgcaccgcgacgcaacgcggggaggcagacaaggtatagggcggcgaggcggctacagccgatagtctggaacagcgcacttacgggttgctgcgcaacccaagtgctaccggcgcggcagcgtgacccgtgtcggcggctccaacggctcgccatcgtccagaaaacacggctcatcgggcatcggcaggcgctgctgcccgcgccgttcccattcctccgtttcggtcaaggctggcaggtctggttccatgcccggaatgccgggctggctgggcggctcctcgccggggccggtcggtagttgctgctcgcccggatacagggtcgggatgcggcgcaggtcgccatgccccaacagcgattcgtcctggtcgtcgtgatcaaccaccacggcggcactgaacaccgacaggcgcaactggtcgcggggctggccccacgccacgcggtcattgaccacgtaggccgacacggtgccggggccgttgagcttcacgacggagatccagcgctcggccaccaagtccttgactgcgtattggaccgtccgcaaagaacgtccgatgagcttggaaagtgtcttctggctgaccaccacggcgttctggtggcccatctgcgccacgaggtgatgcagcagcattg

SEQ ID NO: 81 - DNA, 14130 bp, artificial sequence
  Synthetic
ccgccgtgggtttcctcgcaataagcccggcccacgcctcatgcgctttgcgttccgtttgcacccagtgaccgggcttgttcttggcttgaatgccgatttctctggactgcgtggccatgcttatctccatgcggtaggggtgccgcacggttgcggcaccatgcgcaatcagctgcaacttttcggcagcgcgacaacaattatgcgttgcgtaaaagtggcagtcaattacagattttctttaacctacgcaatgagctattgcggggggtgccgcaatgagctgttgcgtaccccccttttttaagttgttgatttttaagtctttcgcatttcgccctatatctagttctttggtgcccaaagaagggcacccctgcggggttcccccacgccttcggcgcggctccccctccggcaaaaagtggcccctccggggcttgttgatcgactgcgcggccttcggccttgcccaaggtggcgctgcccccttggaacccccgcactcgccgccgtgaggctcggggggcaggcgggcgggcttcgcccttcgactgcccccactcgcataggcttgggtcgttccaggcgcgtcaaggccaagccgctgcgcggtcgctgcgcgagccttgacccgccttccacttggtgtccaaccggcaagcgaagcgcgcaggccgcaggccggaggcttttccccagagaaaattaaaaaaattgatggggcaaggccgcaggccgcgcagttggagccggtgggtatgtggtcgaaggctgggtagccggtgggcaatccctgtggtcaagctcgtgggcaggcgcagcctgtccatcagcttgtccagcagggttgtccacgggccgagcgaagcgagccagccggtggccgctcgcggccatcgtccacatatccacgggctggcaagggagcgcagcgaccgcgcagggcgaagcccggagagcaagcccgtagggcgccgcagccgccgtaggcggtcacgactttgcgaagcaaagtctagtgagtatactcaagcattgagtggcccgccggaggcaccgccttgcgctgcccccgtcgagccggttggacaccaaaagggaggggcaggcatggcggcatacgcgatcatgcgatgcaagaagctggcgaaaatgggcaacgtggcggccagtctcaagcacgcctaccgcgagcgcgagacgcccaacgctgacgccagcaggacgccagagaacgagcactgggcggccagcagcaccgatgaagcgatgggccgactgcgcgagttgctgccagagaagcggcgcaaggacgctgtgttggcggtcgagtacgtcatgacggccagcccggaatggtggaagtcggccagccaagaacagcaggcggcgttcttcgagaaggcgcacaagtggctggcggacaagtacggggcggatcgcatcgtgacggccagcatccaccgtgacgaaaccagcccgcacatgaccgcgttcgtggtgccgctgacgcaggacggcaggctgtcggccaaggagttcatcggcaacaaagcgcagatgacccgcgaccagaccacgtttgcggccgctgtggccgatctagggctgcaacggggcatcgagggcagcaaggcacgtcacacgcgcattcaggcgttctacgaggccctggagcggccaccagtgggccacgtcaccatcagcccgcaagcggtcgagccacgcgcctatgcaccgcagggattggccgaaaagctgggaatctcaaagcgcgttgagacgccggaagccgtggccgaccggctgacaaaagcggttcggcaggggtatgagcctgccctacaggccgccgcaggagcgcgtgagatgcgcaagaaggccgatcaagcccaagagacggcccgtgaccttcgggagcgcctgaagcccgttctggacgccctggggccgttgaatcgggatatgcaggccaaggccgccgcgatcatcaaggccgtgggcgaaaagctgctgacggaacagcgggaagtccagcgccagaaacaggcccagcgccagcaggaacgcgggcgcgcacatttccccgaaaagtgccacctgggatgaatgtcagctactgggctatctggacaagggaaaacgcaagcgcaaagagaaagcaggtagcttgcagtgggcttacatggcgatagctagactgggcggttttatggacagcaagcgaaccggaattgccagctggggcgccctctggtaaggttgggaagccctgcaaagtaaactggatggctttcttgccgccaaggatctgatggcgcaggggatcaagatctgatcaagagacaggatgaggatcgtttcgcatgattgaacaagatggattgcacgcaggttctccggccgcttgggtggagaggctattcggctatgactgggcacaacagacaatcggctgctctgatgccgccgtgttccggctgtcagcgcaggggcgcccggttctttttgtcaagaccgacctgtccggtgccctgaatgaactgcaagacgaggcagcgcggctatcgtggctggccacgacgggcgttccttgcgcagctgtgctcgacgttgtcactgaagcgggaagggactggctgctattgggcgaagtgccggggcaggatctcctgtcatctcaccttgctcctgccgagaaagtatccatcatggctgatgcaatgcggcggctgcatacgcttgatccggctacctgcccattcgaccaccaagcgaaacatcgcatcgagcgagcacgtactcggatggaagccggtcttgtcgatcaggatgatctggacgaagagcatcaggggctcgcgccagccgaactgttcgccaggctcaaggcgcgcatgcccgacggcgaggatctcgtcgtgacccatggcgatgcctgcttgccgaatatcatggtggaaaatggccgcttttctggattcatcgactgtggccggctgggtgtggcggaccgctatcaggacatagcgttggctacccgtgatattgctgaagagcttggcggcgaatgggctgaccgcttcctcgtgctttacggtatcgccgctcccgattcgcagcgcatcgccttctatcgccttcttgacgagttcttctgagcgggactctggggttcgaaatgaccgaccaagcgacgcccaacctgccatcacgagatttcgattccaccgccgccttctatgaaaggttgggcttcggaatcgttttccgggacgccggctggatgatcctccagcgcggggatctcatgctggagttcttcgcccacccccatgggcaaatattatacgcaaggcgacaaggtgctgatgccgctggcgattcaggttcatcatgccgtttgtgatggcttccatgtcggcagaatgcttaatgaattacaacagtttttatgcatgcgcccaatacgcaaaccgcctctccccgcgcgttggccgattcattaatgcagctggcacgacaggtttcccgactggtggataaccgtattaccgcctttgagtgagctgataccgctcgccgcagccgaacgaccgagcgcagcgagtcagtgagcgaggacacaagctttgacagctagctcagtcctaggtataatactagcgtcgacgtggagatataccatgggtgaactgccgagtaggtagctgataacagtacagcgcggctgaaatcatcattaaagcggtgaactgccgagtaggtagctgataactgcaaagtggaacattgccattgtttggctatgtgaactgccgagtaggtagctgataacggatccgaattcgagcgaaggagatatacatatgtttttgcaaagacctaaaccttacagcgatgaaagtttagaaagtttctttatccgagtggctaacaaaaatggctacggtgatgtccatcgcttcctagaagccactaaacgattccttcaagacattgaccataatggctatcaaacctttccgactgatataactcggataaacccatactcagctaaaaacagttccagcgcacgaactgcgtcattcctgaaacttgcacaattgacatttaatgaaccgccagagctacttgggttggcaattaacagaacaaacatgaaatactcgccgtcaactagcgcggttgttagaggtgcagaagtctttcctcgcagtttactacggacgcactccatcccctgctgtcctttgtgtctgcgagaaaatggctacgcctcctacctttggcactttcaggggtacgaatactgccacagccataacgtacctttaattaccacttgtagctgtggtaaggagtttgactaccgagtatctgggttaaagggcatttgctgcaaatgcaaggagcctatcaccttaaccagcagggagaacggtcatgaggcagcgtgtactgtttcaaactggcttgctggccatgaatctaaacctctgccaaatcttcctaaaagctaccgatggggtttagttcattggtggatgggtattaaagatagcgagttcgatcacttttcgttcgttcaatttttctcaaactggccaaggtcattccactcgataatcgaagatgaagtagagttcaaccttgagcatgctgttgtcagcacgtctgaattacgactaaaagatcttcttggtcgattgtttttcggttcaattcggttacctgagcggaatcttcaacacaatatcatccttggtgagcttctctgctatttagaaaatcgtttatggcaagacaagggattaatcgccaacctcaaaatgaacgcgttagaggcgactgtaatgttaaattgtagcctcgatcagattgcatcaatggttgaacaacgcatcttgaagccaaatcgaaaaagcaagcccaacagccctcttgatgttaccgattatctatttcatttcggcgatattttctgtctttggttagctgagttccaaagcgatgagtttaaccgttcgttttatgtgtcgaggtggtaaatgcaaactctgaaagaactaatcgcatccaatcctgacgacttaacaactgaacttaagagagcatttcgtccactcacaccgcatattgcaattgatggtaatgaacttgacgcactgacgatattagtcaatttaaccgataagactgatgatcagaaagacctgctcgatcgagccaaatgcaagcaaaaacttcgagatgaaaaatggtgggctagctgcataaattgcgttaattacagacaaagccataacccaaaattcccggatatacgttctgaaggcgtgattcgaacccaagccctgggtgaattaccgagtttcctactctcgtcctcaaaaatcccaccataccattggtcatatagccatgattcaaaatacgtcaacaaaagcgcattcctcaccaatgagttttgttgggatggtgagatctcatgtttgggtgagcttcttaaagatgcagatcacccactttggaatactttgaaaaagttaggttgttctcaaaaaacttgcaaagcaatggcaaaacaactagctgatattactctcacgactatcaatgtcacactcgcaccaaattacctgactcaaatatctctccccgatagtgatacatcctacatttcactctctcctgttgcatcgctatcgatgcaaagccactttcatcagaggctccaagatgaaaatcggcatagcgcgataacgcggtttagccgaactaccaacatgggggtcactgcgatgacatgtggcggcgcatttagaatgttaaagtctggcgctaagttttccagcccccctcatcaccgattaaacagtaaacgaagttggttgacgtcagagcatgttcagtcattaaaacagtaccagcgcctcaacaaaagcctcatacctgaaaactctcggattgcactccgtagaaaatacaaaatcgagcttcaaaatatggtcagatcttggtttgcaatgcaagaccatacccttgattcgaacatacttatccaacatttgaatcatgacctatcttacttaggagccacaaaacgttttgcatacgatccagcgatgaccaagctctttactgagcttttgaaacgagagttatcaaattcaatcaataatggtgagcaacacactaatggatcgtttttagtcctaccgaatatcagggtttgtggcgcaacagctttaagctccccggtaacggtggggattccatcacttacagctttctttggcttcgttcacgcatttgaacggaatataaatcgcaccacctcatcgtttcgtgttgaatcctttgcgatatgcgtccatcaactacatgtcgagaagcgaggtttgacagcagagtttgtggaaaaaggcgacgggactatatccgctcccgcgacccgggatgactggcagtgtgatgtcgtatttagccttattttgaacaccaactttgctcaacatattgaccaagatacgttagttacatcactaccaaagcgattggctcggggttcagcaaaaattgcgattgatgactttaaacatatcaactcattctcgacattagaaacagcgatcgaatctctgccaatagaagctggtaggtggttatcactttacgcacagtcaaacaataatctaagtgatctattagcagccatgacagaggaccatcagctcatggcaagctgcgtcggttaccacttgttagaagagcccaaagataaaccaaactccctcagaggttacaaacacgctatcgccgagtgcatcattggactcattaactcaatcacctttagctcagagactgatcccaacacaatcttttggtcgctaaagaactatcaaaactacctagtggtacagccaaggagtatcaacgatgaaactaccgacaaatctagcctatgagcgctctatcgacccatcagatgtctgtttttttgtcgtctggcccgatgatagaaaaacacctttaacctacaattctcgtactctgctcgggcaaatggaagcggcatcattagcctatgatgtctcaggtcaaccaataaaaagtgccaccgctgaggcgttagctcaagggaaccctcatcaagttgatttctgccacgttccatacggtgcgagtcatattgaatgcagtttctccgtctcgttttcttctgaactacgtcaaccatataagtgtaactcaagcaaagttaaacaaacgctagtgcaattagtcgagctctacgaaacgaaaatcggctggactgagctagcaacccgatatttgatgaacatttgcaacggtaaatggctgtggaaaaatacccgtaaagcctattgctggaacattgtacttacaccttggccttggaacggggaaaaggttggatttgaagatattcgtactaactacacctcacggcaagactttaaaaataataaaaattggtctgctatagttgaaatgatcaaaaccgcattttctagtactgatgggctggcgatatttgaagtcagggccaccttgcacttgccaacgaatgctatggtgcggccaagccaagttttcacagaaaaagaaagtggcagtaaaagtaaatctaaaactcaaaacagtcgagtttttcagagtacaactattgatggtgaacgatcgccaatactaggggcctttaaaacgggagcagctattgcaaccattgacgactggtatcctgaagccactgagccactaagggtcggacggtttggggttcatcgcgaagatgtcacttgctaccgtcatccgtctaccggaaaagattttttctcgatattacaacaagcagagcactatattgaagtgttgagcgccaacaaaactcccgctcaagaaactatcaacgacatgcactttttaatggctaacctgattaagggtgggatgttccagcataaaggagactgactgtgaaatggtattataagacaatcacctttctgccagagttgtgcaacaacgagtcactggctgcaaagtgtctccgcgttctgcatggatttaactatcagtatgagacacgaaatatcggcgtttcatttccgctttggtgtgatgcaacggttggaaaaaagatttcatttgtcagcaagaacaagatagaactcgacttactacttaaacaacactatttcgtccaaatggaacaacttcaatactttcatatatccaacactgttctcgtcccagaagattgtacatacgtttcctttagacgctgtcaatctatagataagctcacagcagcagggctggcaaggaaaatcagacgcctggagaaacgtgctctatctagaggcgagcaatttgacccatcatcttttgctcaaaaagagcatactgcaatagcgcactaccactcacttggggagtccagcaaacagacgaaccgcaactttcgactcaatatcaggatgctctcggagcaaccccgtgaggggaactcgatttttagtagctatggcttatcaaattcagaaaactcgtttcagcctgtacccttaatctgacctttaataaggagatataccatggcgacaagtttacctacgccctcagcaattacgacttcggcgttagagtatgcattccatactcccgctcgcaatctaacgaaatctcgcggaaaaaacattcatcgttatgtcagtgtaaagatgagtaagaggattacggtagaatctactctagagtgtgatgcctgctatcactttgattttgagccaagtattgttcgcttttgcgctcaaccgattcgatttttatattatctcaatggtcagtctcactcctatgttcctgactttctagttcaatttgataccaacgagtttgttctatatgaagtaaagtcagcttatgctaagaacaaacctgattttgatgttgaatgggaggcgaaagtaaaagcagcaactgaactagggctagaattggagcttgttgaagagagtgatattagggatacggttgtattaaataatcttaagcgcatgcatcgttatgcttcgaaagatgagctgaataacgtacataactctctcttaaaaataataaagtacaatggcgcccaatctgcaagatgcttgggagaacagttgggtttaaaaggccgaactgttttaccaattttgtgcgatttgctgtcaaggtgtttactcgatacacgtttggataagcctctatctcttgaatctcgatttgagttggccagttatggctaagaaagggttctcaagtttccatagaaaagcagtctcttcccaagatacgcttgaatcgatagagcttgtctctagcgctaattgtctagaaagtgttacgtatcaagatatatcagcatttcccgaaacaattgcggtagagattaatttccgattaagcattcttcgctttttagcgcgaaagtgcgaaaccattgtggccaaatcaattgaaccacatcgtgtagagctacagcaaaactatagtagaaaaatacccagtgcaataacgatatatcgatggtggcttgcttttcgaaaatcagactacaaccccattagcttagcacctaatatcaaggatagaggtaatagagagacaaaagtgtcaacagttgttgattctattatggaacaggcagttgaaagagttatatctggacgaaaagtcaatgttagctctgcatataaacgtgttcgacgaaaagttcgtcaatacaatctaactcatggaacgaaatacacgtatcctaagtacgaatctgtaagaaagcgagtaaaaaagaaaaccccatttgagttattagccgcagggaaaggggagagagtagctaagagagagtttcgccgaatgggaaaaaagatcctcacgtctagcgtgctagagagggttgaaatagatcacactgtcgttgacctttttgcagtacacgaagagtatcgaatcccattgggccgaccttggcttactcaattggttgattgttacagtaaagctgtaatcggtttttatttaggtttcgagcctcctagctatgtgtcggtttcccttgcacttaagaatgcaatacaacgcaaagatgacttaatctcctcgtatgaatcgatcgagaatgaatggctatgttatggcatcccagacctactcgtaactgataatggtaaagagtttttgtcgaaagcatttgatcaagcatgtgaatcactattgatcaatgtgcatcaaaataaagttgagacgcccgacaacaaacctcatgttgaacgtaactacgggactattaatacttctctgttagacgatttacctgggaaatccttcagccagtaccttcaaagagaagggtacgactctgtgggagaagctacccttacactcaatgagattagagaaatttacttaatttggttggtggatatttatcataaaaaacccaatcagagaggcactaattgtcctaatgttgcgtggaaaaagggttgtcaagaatgggaaccagaggagttctctggttctaaagacgaattagactttaaatttgctattgttgattacaaacaacttactaaagtagggataactgtctacaaagaactgagttatagcaatgaccgtttagctgaatatagagggaagaaaggaaaccataaagttcagttcaagtataaccctgagtgtatggcagttatttgggtgttggatgaggatatgaatgagtactttacagttaatgcgattgactacgaatatgcaagtagagtatcactttggcaacataaatataacatgaaatatcaagcagaactaaattcagcagaatatgatgaggacaaggaaattgatgcagaaataaaaattgaagaaatcgcagatcgttcaattgttaagactaacaaaatcagagctcggaggcgtggcgctaggcatcaagagaatagcgcaagggctaagtcaatcagtaatgcgaacccggcctcgatacaaaaacatgaagatgaaatcgttagtgcagataatgacgattgggatattgattatgtctgagaaatcgtcaaatgagtgaaacgcgtgaggctcgtatatcaagagctaaaagggcatttgtatccacaccgagcgttaggaaaatcttgagttacatggatagatgtagagatctatcagacctagagtctgagcctacatgcatgatggtctatggtgcttcgggtgtaggtaaaacgaccgtcatcaagaaatacttaaatcaaaacagaagagagtccgaagccgggggcgatataataccggttttgcatattgagttgccagacaatgcgaagccagtagatgcagcaagggaattgctggttgaaatgggtgacccgctagcactttatgaaactgacttagctagattgacgaaaagactgactgaattaatccctgcggtcggcgtgaagctgattattatcgatgagttccaacatttggtggaagaaaggtcaaatcgggttcttacccaagtaggtaattggctaaaaatgatacttaacaaaacgaaatgtccaattgttatatttggtatgccatactcaaaagttgtactgcaagcaaactcgcaacttcacgggcgattttccattcaggttgaactgcgcccctttagctaccagggaggtagaggtgtatttaaaacttttttggaataccttgataaagccctaccttttgaaaaacaggctggcttagccaacgaaagtttgcagaaaaaattgtatgcattctctcagggaaacatgcgttcgttgagaaaccttatttatcaagcatctatcgaagcaattgataatcagcatgagacgataaccgaagaagatttcgtttttgcatcgaagttgacatcgggcgataaacccaactcatggaaaaatccttttgaggagggtgttgaggtaacagaagatatgttacgaccgccaccaaaagatattggttgggaggactatttgagacattcaaccccgagagtgagtaaaccaggtagaaataaaaactttttcgaataacctaggctgctgcgctgctgccaccgctgagcaataactagcataaccccttggggcctctaaacgggtcttgaggggttttttgctgaaacctcaggcatttgttgttgatacaaccataaaatgataattacacccataaattgataattatcacacccataaattgatattgcctcttcatggtctaaacttcagtaagtttacgacattttcctcgagataacttcgtatagcatacattatacgaagttattcgaggtcatttccggggatccatggagaaaaaaatcactggatataccaccgttgatatatcccaatggcatcgtaaagaacattttgaggcatttcagtcagttgctcaatgtacctataaccagaccgttcagctggatattacggcctttttaaagaccgtaaagaaaaataagcacaagttttatccggcctttattcacattcttgcccgcctgatgaatgctcatccggagttccgtatggcaatgaaagacggtgagctggtgatatgggatagtgttcacccttgttacaccgttttccatgagcaaactgaaacgttttcatcgctctggagtgaataccacgacgatttccggcagtttctacacatatattcgcaagatgtggcgtgttacggtgaaaacctggcctatttccctaaagggtttattgagaatatgtttttcgtctcagccaatccctgggtgagtttcaccagttttgatttaaacgtggccaatatggacaacttcttcgcccccgttttcactatgggcaaatattatacgcaaggcgacaaggtgctgatgccgctggcgattcaggttcatcatgccgtttgtgatggcttccatgtcggcagaatgcttaatgaattacaacagtactgcgatgagtggcagggcggggcgtaatttttttaaggcagttattggtgcccttctagagtccttactgcagtagttttgctgaaatactcgattcacaaaaatatcaacttatggttgttttgtgagatatcaatatatggttgttttgtggttaagttgctgattataaataattattaaatatcactttatggttgcatcaacaggtaccgagctcgaattcactggccgtcgttttacaacgtcgtgactgggaaaaccctggcgttacccaacttaatcgccttgcggccagtttgctcaggctctccccgtggaggtaataattgacgatatgatcatttattctgcctcccagagcctgataaaaacggtgaatccgttagcgaggtgccgccggcttccattcaggtcgaggtggcccggctccatgcaccgcgacgcaacgcggggaggcagacaaggtatagggcggcgaggcggctacagccgatagtctggaacagcgcacttacgggttgctgcgcaacccaagtgctaccggcgcggcagcgtgacccgtgtcggcggctccaacggctcgccatcgtccagaaaacacggctcatcgggcatcggcaggcgctgctgcccgcgccgttcccattcctccgtttcggtcaaggctggcaggtctggttccatgcccggaatgccgggctggctgggcggctcctcgccggggccggtcggtagttgctgctcgcccggatacagggtcgggatgcggcgcaggtcgccatgccccaacagcgattcgtcctggtcgtcgtgatcaaccaccacggcggcactgaacaccgacaggcgcaactggtcgcggggctggccccacgccacgcggtcattgaccacgtaggccgacacggtgccggggccgttgagcttcacgacggagatccagcgctcggccaccaagtccttgactgcgtattggaccgtccgcaaagaacgtccgatgagcttggaaagtgtcttctggctgaccaccacggcgttctggtggcccatctgcgccacgaggtgatgcagcagcattg

SEQ ID NO: 82 - DNA, 6786 bp, artificial sequence
  Synthetic
ttcttgaagacgaaagggcctcgtgatacgcctatttttataggttaatgtcatgataataatggtttcttagacgtcaggtggcacttttcggggaaatgtgcgcggaacccctatttgtttatttttctaaatacattcaaatatgtatccgctcatgagacaataaccctgataaatgcttcaataatattgaaaaaggaagagtatgagtattcaacatttccgtgtcgcccttattcccttttttgcggcattttgccttcctgtttttgctcacccagaaacgctggtgaaagtaaaagatgctgaagatcagttgggtgcacgagtgggttacatcgaactggatctcaacagcggtaagatccttgagagttttcgccccgaagaacgttttccaatgatgagcacttttaaagttctgctatgtggcgcggtattatcccgtgttgacgccgggcaagagcaactcggtcgccgcatacactattctcagaatgacttggttgagtactcaccagtcacagaaaagcatcttacggatggcatgacagtaagagaattatgcagtgctgccataaccatgagtgataacactgcggccaacttacttctgacaacgatcggaggaccgaaggagctaaccgcttttttgcacaacatgggggatcatgtaactcgccttgatcgttgggaaccggagctgaatgaagccataccaaacgacgagcgtgacaccacgatgcctgcagcaatggcaacaacgttgcgcaaactattaactggcgaactacttactctagcttcccggcaacaattaatagactggatggaggcggataaagttgcaggaccacttctgcgctcggcccttccggctggctggtttattgctgataaatctggagccggtgagcgtgggtctcgcggtatcattgcagcactggggccagatggtaagccctcccgtatcgtagttatctacacgacggggagtcaggcaactatggatgaacgaaatagacagatcgctgagataggtgcctcactgattaagcattggtaactgtcagaccaagtttactcatatatactttagattgatttaaaacttcatttttaatttaaaaggatctaggtgaagatcctttttgataatctcatgaccaaaatcccttaacgtgagttttcgttccactgagcgtcagaccccgtagaaaagatcaaaggatcttcttgagatcctttttttctgcgcgtaatctgctgcttgcaaacaaaaaaaccaccgctaccagcggtggtttgtttgccggatcaagagctaccaactctttttccgaaggtaactggcttcagcagagcgcagataccaaatactgtccttctagtgtagccgtagttaggccaccacttcaagaactctgtagcaccgcctacatacctcgctctgctaatcctgttaccagtggctgctgccagtggcgataagtcgtgtcttaccgggttggactcaagacgatagttaccggataaggcgcagcggtcgggctgaacggggggttcgtgcacacagcccagcttggagcgaacgacctacaccgaactgagatacctacagcgtgagctatgagaaagcgccacgcttcccgaagggagaaaggcggacaggtatccggtaagcggcagggtcggaacaggagagcgcacgagggagcttccagggggaaacgcctggtatctttatagtcctgtcgggtttcgccacctctgacttgagcgtcgatttttgtgatgctcgtcaggggggcggagcctatggaaaaacgccagcaacgcggcctttttacggttcctggccttttgctggccttttgctcacatgttctttcctgcgttatcccctgattctgtggataaccgtattaccgcctttgagtgagctgataccgctcgccgcagccgaacgaccgagcgcagcgagtcagtgagcgaggaagcggaagagcgcctgatgcggtattttctccttacgcatctgtgcggtatttcacaccgcatatatggtgcactctcagtacaatctgctctgatgccgcatagttaagccagtatacactccgctatcgctacgtgactgggtcatggctgcgccccgacacccgccaacacccgctgacgcgccctgacgggcttgtctgctcccggcatccgcttacagacaagctgtgaccgtctccgggagctgcatgtgtcagaggttttcaccgtcatcaccgaaacgcgcgaggcagctgcggtaaagctcatcagcgtggtcgtgaagcgattcacagatgtctgcctgttcatccgcgtccagctcgttgagtttctccagaagcgttaatgtctggcttctgataaagcgggccatgttaagggcggttttttcctgtttggtcactgatgcctccgtgtaagggggatttctgttcatgggggtaatgataccgatgaaacgagagaggatgctcacgatacgggttactgatgatgaacatgcccggttactggaacgttgtgagggtaaacaactggcggtatggatgcggcgggaccagagaaaaatcactcagggtcaatgccagcgcttcgttaatacagatgtaggtgttccacagggtagccagcagcatcctgcgatgcagatccggaacataatggtgcagggcgctgacttccgcgtttccagactttacgaaacacggaaaccgaagaccattcatgttgttgctcaggtcgcagacgttttgcagcagcagtcgcttcacgttcgctcgcgtatcggtgattcattctgctaaccagtaaggcaaccccgccagcctagccgggtcctcaacgacaggagcacgatcatgcgcacccgtggccaggacccaacgctgcccgagatgcgccgcgtgcggctgctggagatggcggacgcgatggatatgttctgccaagggttggtttgcgcattcacagttctccgcaagaattgattggctccaattcttggagtggtgaatccgttagcgaggtgccgccggcttccattcaggtcgaggtggcccggctccatgcaccgcgacgcaacgcggggaggcagacaaggtatagggcggcgcctacaatccatgccaacccgttccatgtgctcgccgaggcggcataaatcgccgtgacgatcagcggtccagtgatcgaagttaggctggtaagagccgcgagcgatccttgaagctgtccctgatggtcgtcatctacctgcctggacagcatggcctgcaacgcgggcatcccgatgccgccggaagcgagaagaatcataatggggaaggccatccagcctcgcgtcgcgaacgccagcaagacgtagcccagcgcgtcggccgccatgccggcgataatggcctgcttctcgccgaaacgtttggtggcgggaccagtgacgaaggcttgagcgagggcgtgcaagattccgaataccgcaagcgacaggccgatcatcgtcgcgctccagcgaaagcggtcctcgccgaaaatgacccagagcgctgccggcacctgtcctacgagttgcatgataaagaagacagtcataagtgcggcgacgatagtcatgccccgcgcccaccggaaggagctgactgggttgaaggctctcaagggcatcggtcgagatcccggtgcctaatgagtgagctaacttacattaattgcgttgcgctcactgcccgctttccagtcgggaaacctgtcgtgccagctgcattaatgaatcggccaacgcgcggggagaggcggtttgcgtattgggcgccagggtggtttttcttttcaccagtgagacgggcaacagctgattgcccttcaccgcctggccctgagagagttgcagcaagcggtccacgctggtttgccccagcaggcgaaaatcctgtttgatggtggttaacggcgggatataacatgagctgtcttcggtatcgtcgtatcccactaccgagatatccgcaccaacgcgcagcccggactcggtaatggcgcgcattgcgcccagcgccatctgatcgttggcaaccagcatcgcagtgggaacgatgccctcattcagcatttgcatggtttgttgaaaaccggacatggcactccagtcgccttcccgttccgctatcggctgaatttgattgcgagtgagatatttatgccagccagccagacgcagacgcgccgagacagaacttaatgggcccgctaacagcgcgatttgctggtgacccaatgcgaccagatgctccacgcccagtcgcgtaccgtcttcatgggagaaaataatactgttgatgggtgtctggtcagagacatcaagaaataacgccggaacattagtgcaggcagcttccacagcaatggcatcctggtcatccagcggatagttaatgatcagcccactgacgcgttgcgcgagaagattgtgcaccgccgctttacaggcttcgacgccgcttcgttctaccatcgacaccaccacgctggcacccagttgatcggcgcgagatttaatcgccgcgacaatttgcgacggcgcgtgcagggccagactggaggtggcaacgccaatcagcaacgactgtttgcccgccagttgttgtgccacgcggttgggaatgtaattcagctccgccatcgccgcttccactttttcccgcgttttcgcagaaacgtggctggcctggttcaccacgcgggaaacggtctgataagagacaccggcatactctgcgacatcgtataacgttactggtttcacattcaccaccctgaattgactctcttccgggcgctatcatgccataccgcgaaaggttttgcgccattcgatggtgtccgggatctcgacgctctcccttatgcgactcctgcattaggaagcagcccagtagtaggttgaggccgttgagcaccgccgccgcaaggaatggtgcatgcaaggagatggcgcccaacagtcccccggccacggggcctgccaccatacccacgccgaaacaagcgctcatgagcccgaagtggcgagcccgatcttccccatcggtgatgtcggcgatataggcgccagcaaccgcacctgtggcgccggtgatgccggccacgatgcgtccggcgtagaggatcgagatctcgatcccgcgaaattaatacgactcactataggggaattgtgagcggataacaattcccctctagaaataattttgtttaactttaagaaggagatataccatgggctcatcgcatcatcatcatcatcattcatcgggtctggttccgcgcggttcacacggtggtggttcggcggccgctatgggcacccgcctgccgaaaaaaaaacgcaaagtgtccaacctgctgacggtgcaccagaatctgccggcactgccggtcgatgcaaccagtgacgaagtgcgcaaaaatctgatggatatgtttcgtgaccgccaagccttcagcgaacatacgtggaaaatgctgctgtcggtttgccgtagctgggcggcctggtgtaaactgaacaatcgcaaatggtttccggcagaaccggaagatgtgcgtgactatctgctgtacctgcaggcacgtggtctggcagttaaaaccatccagcaacatctgggccaactgaacatgctgcaccgtcgctctggtctgccgcgtccgagtgattccaatgccgtcagtctggtgatgcgtcgcattcgtaaagaaaacgtggatgcaggcgaacgcgctaaacaggcactggcttttgaacgtaccgatttcgaccaagttcgctctctgatggaaaacagtgatcgttgccaggacatccgcaatctggcattcctgggtattgcttataacaccctgctgcgcattgcagaaatcgctcgtattcgcgtgaaagatatcagccgtacggacggcggtcgcatgctgattcacatcggccgtaccaaaacgctggtttccaccgcgggcgtcgaaaaagccctgtcactgggtgtcacgaaactggtggaacgctggatttcagtttcgggcgtcgcagatgacccgaacaattacctgttttgtcgtgtgcgcaaaaatggtgttgcagctccgagcgctacctctcagctgagtacgcgtgcgctggaaggcatcttcgaagccacccatcgcctgatttatggcgcgaaagatgacagcggtcagcgttacctggcatggtccggtcactcagctcgtgttggtgcagcacgtgatatggcacgtgcaggtgtctctatcccggaaattatgcaggccggcggttggacgaacgtgaatattgttatgaactatattcgtaacctggactctgaaacgggtgcgatggtgcgtctgctggaagatggcgactgaggatccggctgctaacaaagcccgaaaggaagctgagttggctgctgccaccgctgagcaataactagcataaccccttggggcctctaaacgggtcttgaggggttttttgctgaaaggaggaactatatccggatatcccgcaagaggcccggcagtaccggcataaccaagcctatgcctacagcatccagggtgacggtgccgaggatgacgatgagcgcattgttagatttcatacacggtgcctgactgcgttagcaatttaactgtgataaactaccgcattaaagcttatcgatgataagctgtcaaacatgagaa

SEQ ID NO: 83 - DNA, 3155 bp, artificial sequence
  Synthetic
gtttctgtaatgaaggagaaaactcaccgaggcagttccataggatggcaagatcctggtatcggtctgcgattccgactcgtccaacatcaatacaacctattaatttcccctcgtcaaaaataaggttatcaagtgagaaatcaccatgagtgacgactgaatccggtgagaatggcaaaagtttatgcatttctttccagacttgttcaacaggccagccattacgctcgtcatcaaaatcactcgcatcaaccaaaccgttattcattcgtgattgcgcctgagcgagacgaaatacgcgatcgctgttaaaaggacaattacaaacaggaatcgaatgcaaccggcgcaggaacactgccagcgcatcaacaatattttcacctgaatcaggatattcttctaatacctggaatgctgtttttccggggatcgcagtggtgagtaaccatgcatcatcaggagtacggataaaatgcttgatggtcggaagaggcataaattccgtcagccagtttagtctgaccatctcatctgtaacatcattggcaacgctacctttgccatgtttcagaaacaactctggcgcatcgggcttcccatacaagcgatagattgtcgcacctgattgcccgacattatcgcgagcccatttatacccatataaatcagcatccatgttggaatttaatcgcggcctcgacgtttcccgttgaatatggctcatactcttcctttttcaatattattgaagcatttatcagggttattgtctcatgagcggatacatatttgaatgtatttagaaaaataaacaaataggggttccgcgcacatttccccgaaaagtgccacctgacgtctaagaaaccattattatcatgacattaacctataaaaataggcgtatcacgaggccctttcgtcacgcgtcctcggtacctaacaccggtcgccaagctttgttgatacaaccataaaatgataattacacccataaattgataattatcacacccataaattgatattgcctcttcatggtctaaacttcagtaagtttacgacattttcatgaagaggtcatttccggggatccttggcgaaaatgagacgttgatcggcacgtaagaggttccaactttcaccataatgaaataagatcactaccgggcgtattttttgagttatcgagattttcaggagctaaggaagctaaaatggagaaaaaaatcactggatataccaccgttgatatatcccaatggcatcgtaaagaacattttgaggcatttcagtcagttgctcaatgtacctataaccagaccgttcagctggatattacggcctttttaaagaccgtaaagaaaaataagcacaagttttatccggcctttattcacattcttgcccgcctgatgaatgctcatccggagttccgtatggcaatgaaagacggtgagctggtgatatgggatagtgttcacccttgttacaccgttttccatgagcaaactgaaacgttttcatcgctctggagtgaataccacgacgatttccggcagtttctacacatatattcgcaagatgtggcgtgttacggtgaaaacctggcctatttccctaaagggtttattgagaatatgtttttcgtctcagccaatccctgggtgagtttcaccagttttgatttaaacgtggccaatatggacaacttcttcgcccccgttttcactatgggcaaatattatacgcaaggcgacaaggtgctgatgccgctggcgattcaggttcatcatgccgtttgtgatggcttccatgtcggcagaatgcttaatgaattacaacagtactgcgatgagtggcagggcggggcgtaatttttttaaggcagttattggtgcccttctagagtccttactgcagtagttttgctgaaatactcgattcacaaaaatatcaacttatggttgttttgtgagatatcaatatatggttgttttgtggttaagttgctgattataaataattattaaatatcactttatggttgcatcaacaggtaccttaagccaacctgttaggatccctctagagtagtagtccatgggtatggacagcggtggaggggaattcccatgtcagccgttaagtgttcctgtgtcactcaaaattgctttgagaggctctaagggcttctcagtgcgttacatccctggcttgttgtccacaaccgttaaaccttaaaagctttaaaagccttatatattcttttttttcttataaaacttaaaaccttagaggctatttaagttgctgatttatattaattttattgttcaaacatgagagcttagtacgtgaaacatgagagcttagtacgttagccatgagagcttagtacgttagccatgagggtttagttcgttaaacatgagagcttagtacgttaaacatgagagcttagtacgtgaaacatgagagcttagtacgtactatcaacaggttgaactgctgatcttcagatcctctacgccggacgcatcgtggccggatcaattccgttttccgctgcataaccctgcttcggggtcattatagcgattttttcggtatatccatcctttttcgcacgatatacaggattttgccaaagggttcgtgtagactttccttggtgtatccaacggcgtcagccgggcaggataggtgaagtaggcccacccgcgagcgggtgttccttcttcactgtcccttattcgcacctggcggtgctcaacgggaatcctgctctgcgaggctggccggctaccgccggcgtaacagatgagggcaagcggatggctgatgaaaccaagccaaccaggaagggcagcccacctatcacggaattgatccccctcgaattgacgcgtaaccagcaatagacataagcggctatttaacgaccctgccctgaaccgacgaccgggtcgaatttgctttcgaatttctgccattcatccgcttattatcacttattcaggcgtagcaaccaggcgtttaagggcaccaataactgccttaaaaaaattagaaaaactcatcgagcatcaaatgaaactgcaatttattcatatcaggattatcaataccatatttttgaaaaagcc

SEQ ID NO: 84 - DNA, 1104 bp, artificial sequence
  Synthetic
ctttgttgatacaaccataaaatgataattacacccataaattgataattatcacacccataaattgatattgcctcttcatggtctaaacttcagtaagtttacgacattttcatgaagaggtcatttccggggatccttggcgaaaatgagacgttgatcggcacgtaagaggttccaactttcaccataatgaaataagatcactaccgggcgtattttttgagttatcgagattttcaggagctaaggaagctaaaatggagaaaaaaatcactggatataccaccgttgatatatcccaatggcatcgtaaagaacattttgaggcatttcagtcagttgctcaatgtacctataaccagaccgttcagctggatattacggcctttttaaagaccgtaaagaaaaataagcacaagttttatccggcctttattcacattcttgcccgcctgatgaatgctcatccggagttccgtatggcaatgaaagacggtgagctggtgatatgggatagtgttcacccttgttacaccgttttccatgagcaaactgaaacgttttcatcgctctggagtgaataccacgacgatttccggcagtttctacacatatattcgcaagatgtggcgtgttacggtgaaaacctggcctatttccctaaagggtttattgagaatatgtttttcgtctcagccaatccctgggtgagtttcaccagttttgatttaaacgtggccaatatggacaacttcttcgcccccgttttcactatgggcaaatattatacgcaaggcgacaaggtgctgatgccgctggcgattcaggttcatcatgccgtttgtgatggcttccatgtcggcagaatgcttaatgaattacaacagtactgcgatgagtggcagggcggggcgtaatttttttaaggcagttattggtgcccttctagagtccttactgcagtagttttgctgaaatactcgattcacaaaaatatcaacttatggttgttttgtgagatatcaatatatggttgttttgtggttaagttgctgattataaataattattaaatatcactttatggttgcatcaacaggt

SEQ ID NO: 85 - DNA, 3630 bp, artificial sequence
  Synthetic
aacgccagcaacgcggcctttttacggttcctggccttttgctggccttttgctcacatgttctttcctgcgttatcccctgattctgtggataaccgtattaccgcctttgagtgagctgataccgctcgccgcagccgaacgaccgagcgcagcgagtcagtgagcgaggaagcggaagagcgcccaatacgcaaaccgcctctccccgcgcgttggccgattcattaatgcagctggcacgacaggtttcccgactggaaagcgggcagtgagcgcaacgcaattaatgtgagttagctcactcattaggcaccccaggctttacactttatgcttccggctcgtatgttgtgtggaattgtgagcggataacaatttcacacaggaaacagctatgaccatgattacgccaagctttgttggaacaaccataaaatgataattacacccataaattgataattatcacacccataaattgatattgcctcttcatggtctaaacttcagtaagtttacgacattttcatgaagaggtcatttccggggatccatggagaaaaaaatcactggatataccaccgttgatatatcccaatggcatcgtaaagaacattttgaggcatttcagtcagttgctcaatgtacctataaccagaccgttcagctggatattacggcctttttaaagaccgtaaagaaaaataagcacaagttttatccggcctttattcacattcttgcccgcctgatgaatgctcatccggagttccgtatggcaatgaaagacggtgagctggtgatatgggatagtgttcacccttgttacaccgttttccatgagcaaactgaaacgttttcatcgctctggagtgaataccacgacgatttccggcagtttctacacatatattcgcaagatgtggcgtgttacggtgaaaacctggcctatttccctaaagggtttattgagaatatgtttttcgtctcagccaatccctgggtgagtttcaccagttttgatttaaacgtggccaatatggacaacttcttcgcccccgttttcactatgggcaaatattatacgcaaggcgacaaggtgctgatgccgctggcgattcaggttcatcatgccgtttgtgatggcttccatgtcggcagaatgcttaatgaattacaacagtactgcgatgagtggcagggcggggcgtaatttttttaaggcagttattggtgcccttctagagtccttactgcagtagttttgctgaaatactcgattcacaaaaatatcaacttatggttgttttgtgagatatcaatatatggttgttttgtggttaagttgctgattataaataattattaaatatcactttatggttgcatcaacaggtaccgagctcgaattcactggccgtcgttttacaacgtcgtgactgggaaaaccctggcgttacccaacttaatcgccttgcagcacatccccctttcgccagctggcgtaatagcgaagaggcccgcaccgatcgcccttcccaacagttgcgcagcctgaatggcgaatggcgcctgatgcggtattttctccttacgcatctgtgcggtatttcacaccgcatatggtgcactctcagtacaatctgctctgatgccgcatagttaagccagccccgacacccgccaacacccgctgacgcgccctgacgggcttgtctgctcccggcatccgcttacagacaagctgtgaccgtctccgggagctgcatgtgtcagaggttttcaccgtcatcaccgaaacgcgcgagacgaaagggcctcgtgatacgcctatttttataggttaatgtcatgataataatggtttcttagacgtcaggtggcacttttcggggaaatgtgcgcggaacccctatttgtttatttttctaaatacattcaaatatgtatccgctcatgagacaataaccctgataaatgcttcaataatattgaaaaaggaagagtatgagtattcaacatttccgtgtcgcccttattcccttttttgcggcattttgccttcctgtttttgctcacccagaaacgctggtgaaagtaaaagatgctgaagatcagttgggtgcacgagtgggttacatcgaactggatctcaacagcggtaagatccttgagagttttcgccccgaagaacgttttccaatgatgagcacttttaaagttctgctatgtggcgcggtattatcccgtattgacgccgggcaagagcaactcggtcgccgcatacactattctcagaatgacttggttgagtactcaccagtcacagaaaagcatcttacggatggcatgacagtaagagaattatgcagtgctgccataaccatgagtgataacactgcggccaacttacttctgacaacgatcggaggaccgaaggagctaaccgcttttttgcacaacatgggggatcatgtaactcgccttgatcgttgggaaccggagctgaatgaagccataccaaacgacgagcgtgacaccacgatgcctgtagcaatggcaacaacgttgcgcaaactattaactggcgaactacttactctagcttcccggcaacaattaatagactggatggaggcggataaagttgcaggaccacttctgcgctcggcccttccggctggctggtttattgctgataaatctggagccggtgagcgtgggtctcgcggtatcattgcagcactggggccagatggtaagccctcccgtatcgtagttatctacacgacggggagtcaggcaactatggatgaacgaaatagacagatcgctgagataggtgcctcactgattaagcattggtaactgtcagaccaagtttactcatatatactttagattgatttaaaacttcatttttaatttaaaaggatctaggtgaagatcctttttgataatctcatgaccaaaatcccttaacgtgagttttcgttccactgagcgtcagaccccgtagaaaagatcaaaggatcttcttgagatcctttttttctgcgcgtaatctgctgcttgcaaacaaaaaaaccaccgctaccagcggtggtttgtttgccggatcaagagctaccaactctttttccgaaggtaactggcttcagcagagcgcagataccaaatactgttcttctagtgtagccgtagttaggccaccacttcaagaactctgtagcaccgcctacatacctcgctctgctaatcctgttaccagtggctgctgccagtggcgataagtcgtgtcttaccgggttggactcaagacgatagttaccggataaggcgcagcggtcgggctgaacggggggttcgtgcacacagcccagcttggagcgaacgacctacaccgaactgagatacctacagcgtgagctatgagaaagcgccacgcttcccgaagggagaaaggcggacaggtatccggtaagcggcagggtcggaacaggagagcgcacgagggagcttccagggggaaacgcctggtatctttatagtcctgtcgggtttcgccacctctgacttgagcgtcgatttttgtgatgctcgtcaggggggcggagcctatggaaa

SEQ ID NO: 86 - DNA, 3453 bp, artificial sequence
  Synthetic
gacgaaagggcctcgtgatacgcctatttttataggttaatgtcatgataataatggtttcttagacgtcaggtggcacttttcggggaaatgtgcgcggaacccctatttgtttatttttctaaatacattcaaatatgtatccgctcatgagacaataaccctgataaatgcttcaataatattgaaaaaggaagagtatgagtattcaacatttccgtgtcgcccttattcccttttttgcggcattttgccttcctgtttttgctcacccagaaacgctggtgaaagtaaaagatgctgaagatcagttgggtgcacgagtgggttacatcgaactggatctcaacagcggtaagatccttgagagttttcgccccgaagaacgttttccaatgatgagcacttttaaagttctgctatgtggcgcggtattatcccgtattgacgccgggcaagagcaactcggtcgccgcatacactattctcagaatgacttggttgagtactcaccagtcacagaaaagcatcttacggatggcatgacagtaagagaattatgcagtgctgccataaccatgagtgataacactgcggccaacttacttctgacaacgatcggaggaccgaaggagctaaccgcttttttgcacaacatgggggatcatgtaactcgccttgatcgttgggaaccggagctgaatgaagccataccaaacgacgagcgtgacaccacgatgcctgtagcaatggcaacaacgttgcgcaaactattaactggcgaactacttactctagcttcccggcaacaattaatagactggatggaggcggataaagttgcaggaccacttctgcgctcggcccttccggctggctggtttattgctgataaatctggagccggtgagcgtggctctcgcggtatcattgcagcactggggccagatggtaagccctcccgtatcgtagttatctacacgacggggagtcaggcaactatggatgaacgaaatagacagatcgctgagataggtgcctcactgattaagcattggtaactgtcagaccaagtttactcatatatactttagattgatttaaaacttcatttttaatttaaaaggatctaggtgaagatcctttttgataatctcatgaccaaaatcccttaacgtgagttttcgttccactgagcgtcagaccccgtagaaaagatcaaaggatcttcttgagatcctttttttctgcgcgtaatctgctgcttgcaaacaaaaaaaccaccgctaccagcggtggtttgtttgccggatcaagagctaccaactctttttccgaaggtaactggcttcagcagagcgcagataccaaatactgttcttctagtgtagccgtagttaggccaccacttcaagaactctgtagcaccgcctacatacctcgctctgctaatcctgttaccagtggctgctgccagtggcgataagtcgtgtcttaccgggttggactcaagacgatagttaccggataaggcgcagcggtcgggctgaacggggggttcgtgcacacagcccagcttggagcgaacgacctacaccgaactgagatacctacagcgtgagctatgagaaagcgccacgcttcccgaagggagaaaggcggacaggtatccggtaagcggcagggtcggaacaggagagcgcacgagggagcttccagggggaaacgcctggtatctttatagtcctgtcgggtttcgccacctctgacttgagcgtcgatttttgtgatgctcgtcaggggggcggagcctatggaaaaacgccagcaacgcggcctttttacggttcctggccttttgctggccttttgctcacatgttctttcctgcgttatcccctgattctgtggataaccgtattaccgcctttgagtgagctgataccgctcgccgcagccgaactaccgagcgcagcgagtcagtgagcgaggaagcggaagagcgcccaatacgcaaaccgcctctccccgcgcgttggccgattcattaatgcagcccaagctttgttggaacaaccataaaatgataattacacccataaattgataattatcacacccataaattgatattgcctcttcatggtctaaacttcagtaagtttacgacattttcctcgaggtcatttccggggatccatggagaaaaaaatcactggatataccaccgttgatatatcccaatggcatcgtaaagaacattttgaggcatttcagtcagttgctcaatgtacctataaccagaccgttcagctggatattacggcctttttaaagaccgtaaagaaaaataagcacaagttttatccggcctttattcacattcttgcccgcctgatgaatgctcatccggagttccgtatggcaatgaaagacggtgagctggtgatatgggatagtgttcacccttgttacaccgttttccatgagcaaactgaaacgttttcatcgctctggagtgaataccacgacgatttccggcagtttctacacatatattcgcaagatgtggcgtgttacggtgaaaacctggcctatttccctaaagggtttattgagaatatgtttttcgtctcagccaatccctgggtgagtttcaccagttttgatttaaacgtggccaatatggacaacttcttcgcccccgttttcactatgggcaaatattatacgcaaggcgacaaggtgctgatgccgctggcgattcaggttcatcatgccgtttgtgatggcttccatgtcggcagaatgcttaatgaattacaacagtactgcgatgagtggcagggcggggcgtaatttttttaaggcagttattggtgcccttctagagtccttactgcagtagttttgctgaaatactcgattcacaaaaatatcaacttatggttgttttgtgagatatcaatatatggttgttttgtggttaagttgctgattataaataattattaaatatcactttatggttgcatcaacaggtaccgagctcgaattcactggccgtcgttttacaacgtcgtgactgggaaaaccctggcgttacccaacttaatcgccttgcagcacatccccctttcgccagctggcgtaatagcgaagaggcccgcaccgatcgcccttcccaacagttgcgcagcctgaatggcgaatggcgcctgatgcggtattttctccttacgcatctgtgcggtatttcacaccgcatatggtgcactctcagtacaatctgctctgatgccgcatagttaagccagccccgacacccgccaacacccgctgacgcgccctgacgggcttgtctgctcccggcatccgcttacagacaagctgtgaccgtctccgggagctgcatgtgtcagaggttttcaccgtcatcaccgaaacgcgcga

SEQ ID NO: 87 - DNA, 14028 bp, artificial sequence
  Synthetic
ccgccgtgggtttcctcgcaataagcccggcccacgcctcatgcgctttgcgttccgtttgcacccagtgaccgggcttgttcttggcttgaatgccgatttctctggactgcgtggccatgcttatctccatgcggtaggggtgccgcacggttgcggcaccatgcgcaatcagctgcaacttttcggcagcgcgacaacaattatgcgttgcgtaaaagtggcagtcaattacagattttctttaacctacgcaatgagctattgcggggggtgccgcaatgagctgttgcgtaccccccttttttaagttgttgatttttaagtctttcgcatttcgccctatatctagttctttggtgcccaaagaagggcacccctgcggggttcccccacgccttcggcgcggctccccctccggcaaaaagtggcccctccggggcttgttgatcgactgcgcggccttcggccttgcccaaggtggcgctgcccccttggaacccccgcactcgccgccgtgaggctcggggggcaggcgggcgggcttcgcccttcgactgcccccactcgcataggcttgggtcgttccaggcgcgtcaaggccaagccgctgcgcggtcgctgcgcgagccttgacccgccttccacttggtgtccaaccggcaagcgaagcgcgcaggccgcaggccggaggcttttccccagagaaaattaaaaaaattgatggggcaaggccgcaggccgcgcagttggagccggtgggtatgtggtcgaaggctgggtagccggtgggcaatccctgtggtcaagctcgtgggcaggcgcagcctgtccatcagcttgtccagcagggttgtccacgggccgagcgaagcgagccagccggtggccgctcgcggccatcgtccacatatccacgggctggcaagggagcgcagcgaccgcgcagggcgaagcccggagagcaagcccgtagggcgccgcagccgccgtaggcggtcacgactttgcgaagcaaagtctagtgagtatactcaagcattgagtggcccgccggaggcaccgccttgcgctgcccccgtcgagccggttggacaccaaaagggaggggcaggcatggcggcatacgcgatcatgcgatgcaagaagctggcgaaaatgggcaacgtggcggccagtctcaagcacgcctaccgcgagcgcgagacgcccaacgctgacgccagcaggacgccagagaacgagcactgggcggccagcagcaccgatgaagcgatgggccgactgcgcgagttgctgccagagaagcggcgcaaggacgctgtgttggcggtcgagtacgtcatgacggccagcccggaatggtggaagtcggccagccaagaacagcaggcggcgttcttcgagaaggcgcacaagtggctggcggacaagtacggggcggatcgcatcgtgacggccagcatccaccgtgacgaaaccagcccgcacatgaccgcgttcgtggtgccgctgacgcaggacggcaggctgtcggccaaggagttcatcggcaacaaagcgcagatgacccgcgaccagaccacgtttgcggccgctgtggccgatctagggctgcaacggggcatcgagggcagcaaggcacgtcacacgcgcattcaggcgttctacgaggccctggagcggccaccagtgggccacgtcaccatcagcccgcaagcggtcgagccacgcgcctatgcaccgcagggattggccgaaaagctgggaatctcaaagcgcgttgagacgccggaagccgtggccgaccggctgacaaaagcggttcggcaggggtatgagcctgccctacaggccgccgcaggagcgcgtgagatgcgcaagaaggccgatcaagcccaagagacggcccgtgaccttcgggagcgcctgaagcccgttctggacgccctggggccgttgaatcgggatatgcaggccaaggccgccgcgatcatcaaggccgtgggcgaaaagctgctgacggaacagcgggaagtccagcgccagaaacaggcccagcgccagcaggaacgcgggcgcgcacatttccccgaaaagtgccacctgggatgaatgtcagctactgggctatctggacaagggaaaacgcaagcgcaaagagaaagcaggtagcttgcagtgggcttacatggcgatagctagactgggcggttttatggacagcaagcgaaccggaattgccagctggggcgccctctggtaaggttgggaagccctgcaaagtaaactggatggctttcttgccgccaaggatctgatggcgcaggggatcaagatctgatcaagagacaggatgaggatcgtttcgcatgattgaacaagatggattgcacgcaggttctccggccgcttgggtggagaggctattcggctatgactgggcacaacagacaatcggctgctctgatgccgccgtgttccggctgtcagcgcaggggcgcccggttctttttgtcaagaccgacctgtccggtgccctgaatgaactgcaagacgaggcagcgcggctatcgtggctggccacgacgggcgttccttgcgcagctgtgctcgacgttgtcactgaagcgggaagggactggctgctattgggcgaagtgccggggcaggatctcctgtcatctcaccttgctcctgccgagaaagtatccatcatggctgatgcaatgcggcggctgcatacgcttgatccggctacctgcccattcgaccaccaagcgaaacatcgcatcgagcgagcacgtactcggatggaagccggtcttgtcgatcaggatgatctggacgaagagcatcaggggctcgcgccagccgaactgttcgccaggctcaaggcgcgcatgcccgacggcgaggatctcgtcgtgacccatggcgatgcctgcttgccgaatatcatggtggaaaatggccgcttttctggattcatcgactgtggccggctgggtgtggcggaccgctatcaggacatagcgttggctacccgtgatattgctgaagagcttggcggcgaatgggctgaccgcttcctcgtgctttacggtatcgccgctcccgattcgcagcgcatcgccttctatcgccttcttgacgagttcttctgagcgggactctggggttcgaaatgaccgaccaagcgacgcccaacctgccatcacgagatttcgattccaccgccgccttctatgaaaggttgggcttcggaatcgttttccgggacgccggctggatgatcctccagcgcggggatctcatgctggagttcttcgcccacccccatgggcaaatattatacgcaaggcgacaaggtgctgatgccgctggcgattcaggttcatcatgccgtttgtgatggcttccatgtcggcagaatgcttaatgaattacaacagtttttatgcatgcgcccaatacgcaaaccgcctctccccgcgcgttggccgattcattaatgcagctggcacgacaggtttcccgactggtggataaccgtattaccgcctttgagtgagctgataccgctcgccgcagccgaacgaccgagcgcagcgagtcagtgagcgaggacacaagctttgacagctagctcagtcctaggtataatactagcgtcgacgtggagatataccatgggtgaactgccgagtaggtagctgataacgagacctctgtcttgtcagctagggtggtctcgtgaactgccgagtaggtagctgataacggatccgaattcgagcgaaggagatatacatatgtttttgcaaagacctaaaccttacagcgatgaaagtttagaaagtttctttatccgagtggctaacaaaaatggctacggtgatgtccatcgcttcctagaagccactaaacgattccttcaagacattgaccataatggctatcaaacctttccgactgatataactcggataaacccatactcagctaaaaacagttccagcgcacgaactgcgtcattcctgaaacttgcacaattgacatttaatgaaccgccagagctacttgggttggcaattaacagaacaaacatgaaatactcgccgtcaactagcgcggttgttagaggtgcagaagtctttcctcgcagtttactacggacgcactccatcccctgctgtcctttgtgtctgcgagaaaatggctacgcctcctacctttggcactttcaggggtacgaatactgccacagccataacgtacctttaattaccacttgtagctgtggtaaggagtttgactaccgagtatctgggttaaagggcatttgctgcaaatgcaaggagcctatcaccttaaccagcagggagaacggtcatgaggcagcgtgtactgtttcaaactggcttgctggccatgaatctaaacctctgccaaatcttcctaaaagctaccgatggggtttagttcattggtggatgggtattaaagatagcgagttcgatcacttttcgttcgttcaatttttctcaaactggccaaggtcattccactcgataatcgaagatgaagtagagttcaaccttgagcatgctgttgtcagcacgtctgaattacgactaaaagatcttcttggtcgattgtttttcggttcaattcggttacctgagcggaatcttcaacacaatatcatccttggtgagcttctctgctatttagaaaatcgtttatggcaagacaagggattaatcgccaacctcaaaatgaacgcgttagaggcgactgtaatgttaaattgtagcctcgatcagattgcatcaatggttgaacaacgcatcttgaagccaaatcgaaaaagcaagcccaacagccctcttgatgttaccgattatctatttcatttcggcgatattttctgtctttggttagctgagttccaaagcgatgagtttaaccgttcgttttatgtgtcgaggtggtaaatgcaaactctgaaagaactaatcgcatccaatcctgacgacttaacaactgaacttaagagagcatttcgtccactcacaccgcatattgcaattgatggtaatgaacttgacgcactgacgatattagtcaatttaaccgataagactgatgatcagaaagacctgctcgatcgagccaaatgcaagcaaaaacttcgagatgaaaaatggtgggctagctgcataaattgcgttaattacagacaaagccataacccaaaattcccggatatacgttctgaaggcgtgattcgaacccaagccctgggtgaattaccgagtttcctactctcgtcctcaaaaatcccaccataccattggtcatatagccatgattcaaaatacgtcaacaaaagcgcattcctcaccaatgagttttgttgggatggtgagatctcatgtttgggtgagcttcttaaagatgcagatcacccactttggaatactttgaaaaagttaggttgttctcaaaaaacttgcaaagcaatggcaaaacaactagctgatattactctcacgactatcaatgtcacactcgcaccaaattacctgactcaaatatctctccccgatagtgatacatcctacatttcactctctcctgttgcatcgctatcgatgcaaagccactttcatcagaggctccaagatgaaaatcggcatagcgcgataacgcggtttagccgaactaccaacatgggggtcactgcgatgacatgtggcggcgcatttagaatgttaaagtctggcgctaagttttccagcccccctcatcaccgattaaacagtaaacgaagttggttgacgtcagagcatgttcagtcattaaaacagtaccagcgcctcaacaaaagcctcatacctgaaaactctcggattgcactccgtagaaaatacaaaatcgagcttcaaaatatggtcagatcttggtttgcaatgcaagaccatacccttgattcgaacatacttatccaacatttgaatcatgacctatcttacttaggagccacaaaacgttttgcatacgatccagcgatgaccaagctctttactgagcttttgaaacgagagttatcaaattcaatcaataatggtgagcaacacactaatggatcgtttttagtcctaccgaatatcagggtttgtggcgcaacagctttaagctccccggtaacggtggggattccatcacttacagctttctttggcttcgttcacgcatttgaacggaatataaatcgcaccacctcatcgtttcgtgttgaatcctttgcgatatgcgtccatcaactacatgtcgagaagcgaggtttgacagcagagtttgtggaaaaaggcgacgggactatatccgctcccgcgacccgggatgactggcagtgtgatgtcgtatttagccttattttgaacaccaactttgctcaacatattgaccaagatacgttagttacatcactaccaaagcgattggctcggggttcagcaaaaattgcgattgatgactttaaacatatcaactcattctcgacattagaaacagcgatcgaatctctgccaatagaagctggtaggtggttatcactttacgcacagtcaaacaataatctaagtgatctattagcagccatgacagaggaccatcagctcatggcaagctgcgtcggttaccacttgttagaagagcccaaagataaaccaaactccctcagaggttacaaacacgctatcgccgagtgcatcattggactcattaactcaatcacctttagctcagagactgatcccaacacaatcttttggtcgctaaagaactatcaaaactacctagtggtacagccaaggagtatcaacgatgaaactaccgacaaatctagcctatgagcgctctatcgacccatcagatgtctgtttttttgtcgtctggcccgatgatagaaaaacacctttaacctacaattctcgtactctgctcgggcaaatggaagcggcatcattagcctatgatgtctcaggtcaaccaataaaaagtgccaccgctgaggcgttagctcaagggaaccctcatcaagttgatttctgccacgttccatacggtgcgagtcatattgaatgcagtttctccgtctcgttttcttctgaactacgtcaaccatataagtgtaactcaagcaaagttaaacaaacgctagtgcaattagtcgagctctacgaaacgaaaatcggctggactgagctagcaacccgatatttgatgaacatttgcaacggtaaatggctgtggaaaaatacccgtaaagcctattgctggaacattgtacttacaccttggccttggaacggggaaaaggttggatttgaagatattcgtactaactacacctcacggcaagactttaaaaataataaaaattggtctgctatagttgaaatgatcaaaaccgcattttctagtactgatgggctggcgatatttgaagtcagggccaccttgcacttgccaacgaatgctatggtgcggccaagccaagttttcacagaaaaagaaagtggcagtaaaagtaaatctaaaactcaaaacagtcgagtttttcagagtacaactattgatggtgaacgatcgccaatactaggggcctttaaaacgggagcagctattgcaaccattgacgactggtatcctgaagccactgagccactaagggtcggacggtttggggttcatcgcgaagatgtcacttgctaccgtcatccgtctaccggaaaagattttttctcgatattacaacaagcagagcactatattgaagtgttgagcgccaacaaaactcccgctcaagaaactatcaacgacatgcactttttaatggctaacctgattaagggtgggatgttccagcataaaggagactgactgtgaaatggtattataagacaatcacctttctgccagagttgtgcaacaacgagtcactggctgcaaagtgtctccgcgttctgcatggatttaactatcagtatgagacacgaaatatcggcgtttcatttccgctttggtgtgatgcaacggttggaaaaaagatttcatttgtcagcaagaacaagatagaactcgacttactacttaaacaacactatttcgtccaaatggaacaacttcaatactttcatatatccaacactgttctcgtcccagaagattgtacatacgtttcctttagacgctgtcaatctatagataagctcacagcagcagggctggcaaggaaaatcagacgcctggagaaacgtgctctatctagaggcgagcaatttgacccatcatcttttgctcaaaaagagcatactgcaatagcgcactaccactcacttggggagtccagcaaacagacgaaccgcaactttcgactcaatatcaggatgctctcggagcaaccccgtgaggggaactcgatttttagtagctatggcttatcaaattcagaaaactcgtttcagcctgtacccttaatctgacctttaataaggagatataccatggcgacaagtttacctacgccctcagcaattacgacttcggcgttagagtatgcattccatactcccgctcgcaatctaacgaaatctcgcggaaaaaacattcatcgttatgtcagtgtaaagatgagtaagaggattacggtagaatctactctagagtgtgatgcctgctatcactttgattttgagccaagtattgttcgcttttgcgctcaaccgattcgatttttatattatctcaatggtcagtctcactcctatgttcctgactttctagttcaatttgataccaacgagtttgttctatatgaagtaaagtcagcttatgctaagaacaaacctgattttgatgttgaatgggaggcgaaagtaaaagcagcaactgaactagggctagaattggagcttgttgaagagagtgatattagggatacggttgtattaaataatcttaagcgcatgcatcgttatgcttcgaaagatgagctgaataacgtacataactctctcttaaaaataataaagtacaatggcgcccaatctgcaagatgcttgggagaacagttgggtttaaaaggccgaactgttttaccaattttgtgcgatttgctgtcaaggtgtttactcgatacacgtttggataagcctctatctcttgaatctcgatttgagttggccagttatggctaagaaagggttctcaagtttccatagaaaagcagtctcttcccaagatacgcttgaatcgatagagcttgtctctagcgctaattgtctagaaagtgttacgtatcaagatatatcagcatttcccgaaacaattgcggtagagattaatttccgattaagcattcttcgctttttagcgcgaaagtgcgaaaccattgtggccaaatcaattgaaccacatcgtgtagagctacagcaaaactatagtagaaaaatacccagtgcaataacgatatatcgatggtggcttgcttttcgaaaatcagactacaaccccattagcttagcacctaatatcaaggatagaggtaatagagagacaaaagtgtcaacagttgttgattctattatggaacaggcagttgaaagagttatatctggacgaaaagtcaatgttagctctgcatataaacgtgttcgacgaaaagttcgtcaatacaatctaactcatggaacgaaatacacgtatcctaagtacgaatctgtaagaaagcgagtaaaaaagaaaaccccatttgagttattagccgcagggaaaggggagagagtagctaagagagagtttcgccgaatgggaaaaaagatcctcacgtctagcgtgctagagagggttgaaatagatcacactgtcgttgacctttttgcagtacacgaagagtatcgaatcccattgggccgaccttggcttactcaattggttgattgttacagtaaagctgtaatcggtttttatttaggtttcgagcctcctagctatgtgtcggtttcccttgcacttaagaatgcaatacaacgcaaagatgacttaatctcctcgtatgaatcgatcgagaatgaatggctatgttatggcatcccagacctactcgtaactgataatggtaaagagtttttgtcgaaagcatttgatcaagcatgtgaatcactattgatcaatgtgcatcaaaataaagttgagacgcccgacaacaaacctcatgttgaacgtaactacgggactattaatacttctctgttagacgatttacctgggaaatccttcagccagtaccttcaaagagaagggtacgactctgtgggagaagctacccttacactcaatgagattagagaaatttacttaatttggttggtggatatttatcataaaaaacccaatcagagaggcactaattgtcctaatgttgcgtggaaaaagggttgtcaagaatgggaaccagaggagttctctggttctaaagacgaattagactttaaatttgctattgttgattacaaacaacttactaaagtagggataactgtctacaaagaactgagttatagcaatgaccgtttagctgaatatagagggaagaaaggaaaccataaagttcagttcaagtataaccctgagtgtatggcagttatttgggtgttggatgaggatatgaatgagtactttacagttaatgcgattgactacgaatatgcaagtagagtatcactttggcaacataaatataacatgaaatatcaagcagaactaaattcagcagaatatgatgaggacaaggaaattgatgcagaaataaaaattgaagaaatcgcagatcgttcaattgttaagactaacaaaatcagagctcggaggcgtggcgctaggcatcaagagaatagcgcaagggctaagtcaatcagtaatgcgaacccggcctcgatacaaaaacatgaagatgaaatcgttagtgcagataatgacgattgggatattgattatgtctgagaaatcgtcaaatgagtgaaacgcgtgaggctcgtatatcaagagctaaaagggcatttgtatccacaccgagcgttaggaaaatcttgagttacatggatagatgtagagatctatcagacctagagtctgagcctacatgcatgatggtctatggtgcttcgggtgtaggtaaaacgaccgtcatcaagaaatacttaaatcaaaacagaagagagtccgaagccgggggcgatataataccggttttgcatattgagttgccagacaatgcgaagccagtagatgcagcaagggaattgctggttgaaatgggtgacccgctagcactttatgaaactgacttagctagattgacgaaaagactgactgaattaatccctgcggtcggcgtgaagctgattattatcgatgagttccaacatttggtggaagaaaggtcaaatcgggttcttacccaagtaggtaattggctaaaaatgatacttaacaaaacgaaatgtccaattgttatatttggtatgccatactcaaaagttgtactgcaagcaaactcgcaacttcacgggcgattttccattcaggttgaactgcgcccctttagctaccagggaggtagaggtgtatttaaaacttttttggaataccttgataaagccctaccttttgaaaaacaggctggcttagccaacgaaagtttgcagaaaaaattgtatgcattctctcagggaaacatgcgttcgttgagaaaccttatttatcaagcatctatcgaagcaattgataatcagcatgagacgataaccgaagaagatttcgtttttgcatcgaagttgacatcgggcgataaacccaactcatggaaaaatccttttgaggagggtgttgaggtaacagaagatatgttacgaccgccaccaaaagatattggttgggaggactatttgagacattcaaccccgagagtgagtaaaccaggtagaaataaaaactttttcgaataacctaggctgctgcgctgctgccaccgctgagcaataactagcataaccccttggggcctctaaacgggtcttgaggggttttttgctgaaacctcaggcatgttggaacaaccataaaatgataattacacccataaattgataattatcacacccataaattgatattgcctcttcatggtctaaacttcagtaagtttacgacattttcatgaagaggtcatttccggggatccatggagaaaaaaatcactggatataccaccgttgatatatcccaatggcatcgtaaagaacattttgaggcatttcagtcagttgctcaatgtacctataaccagaccgttcagctggatattacggcctttttaaagaccgtaaagaaaaataagcacaagttttatccggcctttattcacattcttgcccgcctgatgaatgctcatccggagttccgtatggcaatgaaagacggtgagctggtgatatgggatagtgttcacccttgttacaccgttttccatgagcaaactgaaacgttttcatcgctctggagtgaataccacgacgatttccggcagtttctacacatatattcgcaagatgtggcgtgttacggtgaaaacctggcctatttccctaaagggtttattgagaatatgtttttcgtctcagccaatccctgggtgagtttcaccagttttgatttaaacgtggccaatatggacaacttcttcgcccccgttttcactatgggcaaatattatacgcaaggcgacaaggtgctgatgccgctggcgattcaggttcatcatgccgtttgtgatggcttccatgtcggcagaatgcttaatgaattacaacagtactgcgatgagtggcagggcggggcgtaatttttttaaggcagttattggtgcccttctagagtccttactgcagtagttttgctgaaatactcgattcacaaaaatatcaacttatggttgttttgtgagatatcaatatatggttgttttgtggttaagttgctgattataaataattattaaatatcactttatggttgcatcaacaggtaccgagctcgaattcactggccgtcgttttacaacgtcgtgactgggaaaaccctggcgttacccaacttaatcgccttgcggccagtttgctcaggctctccccgtggaggtaataattgacgatatgatcatttattctgcctcccagagcctgataaaaacggtgaatccgttagcgaggtgccgccggcttccattcaggtcgaggtggcccggctccatgcaccgcgacgcaacgcggggaggcagacaaggtatagggcggcgaggcggctacagccgatagtctggaacagcgcacttacgggttgctgcgcaacccaagtgctaccggcgcggcagcgtgacccgtgtcggcggctccaacggctcgccatcgtccagaaaacacggctcatcgggcatcggcaggcgctgctgcccgcgccgttcccattcctccgtttcggtcaaggctggcaggtctggttccatgcccggaatgccgggctggctgggcggctcctcgccggggccggtcggtagttgctgctcgcccggatacagggtcgggatgcggcgcaggtcgccatgccccaacagcgattcgtcctggtcgtcgtgatcaaccaccacggcggcactgaacaccgacaggcgcaactggtcgcggggctggccccacgccacgcggtcattgaccacgtaggccgacacggtgccggggccgttgagcttcacgacggagatccagcgctcggccaccaagtccttgactgcgtattggaccgtccgcaaagaacgtccgatgagcttggaaagtgtcttctggctgaccaccacggcgttctggtggcccatctgcgccacgaggtgatgcagcagcattg

SEQ ID NO: 88 - DNA, 14028 bp, artificial sequence
  Synthetic
ccgccgtgggtttcctcgcaataagcccggcccacgcctcatgcgctttgcgttccgtttgcacccagtgaccgggcttgttcttggcttgaatgccgatttctctggactgcgtggccatgcttatctccatgcggtaggggtgccgcacggttgcggcaccatgcgcaatcagctgcaacttttcggcagcgcgacaacaattatgcgttgcgtaaaagtggcagtcaattacagattttctttaacctacgcaatgagctattgcggggggtgccgcaatgagctgttgcgtaccccccttttttaagttgttgatttttaagtctttcgcatttcgccctatatctagttctttggtgcccaaagaagggcacccctgcggggttcccccacgccttcggcgcggctccccctccggcaaaaagtggcccctccggggcttgttgatcgactgcgcggccttcggccttgcccaaggtggcgctgcccccttggaacccccgcactcgccgccgtgaggctcggggggcaggcgggcgggcttcgcccttcgactgcccccactcgcataggcttgggtcgttccaggcgcgtcaaggccaagccgctgcgcggtcgctgcgcgagccttgacccgccttccacttggtgtccaaccggcaagcgaagcgcgcaggccgcaggccggaggcttttccccagagaaaattaaaaaaattgatggggcaaggccgcaggccgcgcagttggagccggtgggtatgtggtcgaaggctgggtagccggtgggcaatccctgtggtcaagctcgtgggcaggcgcagcctgtccatcagcttgtccagcagggttgtccacgggccgagcgaagcgagccagccggtggccgctcgcggccatcgtccacatatccacgggctggcaagggagcgcagcgaccgcgcagggcgaagcccggagagcaagcccgtagggcgccgcagccgccgtaggcggtcacgactttgcgaagcaaagtctagtgagtatactcaagcattgagtggcccgccggaggcaccgccttgcgctgcccccgtcgagccggttggacaccaaaagggaggggcaggcatggcggcatacgcgatcatgcgatgcaagaagctggcgaaaatgggcaacgtggcggccagtctcaagcacgcctaccgcgagcgcgagacgcccaacgctgacgccagcaggacgccagagaacgagcactgggcggccagcagcaccgatgaagcgatgggccgactgcgcgagttgctgccagagaagcggcgcaaggacgctgtgttggcggtcgagtacgtcatgacggccagcccggaatggtggaagtcggccagccaagaacagcaggcggcgttcttcgagaaggcgcacaagtggctggcggacaagtacggggcggatcgcatcgtgacggccagcatccaccgtgacgaaaccagcccgcacatgaccgcgttcgtggtgccgctgacgcaggacggcaggctgtcggccaaggagttcatcggcaacaaagcgcagatgacccgcgaccagaccacgtttgcggccgctgtggccgatctagggctgcaacggggcatcgagggcagcaaggcacgtcacacgcgcattcaggcgttctacgaggccctggagcggccaccagtgggccacgtcaccatcagcccgcaagcggtcgagccacgcgcctatgcaccgcagggattggccgaaaagctgggaatctcaaagcgcgttgagacgccggaagccgtggccgaccggctgacaaaagcggttcggcaggggtatgagcctgccctacaggccgccgcaggagcgcgtgagatgcgcaagaaggccgatcaagcccaagagacggcccgtgaccttcgggagcgcctgaagcccgttctggacgccctggggccgttgaatcgggatatgcaggccaaggccgccgcgatcatcaaggccgtgggcgaaaagctgctgacggaacagcgggaagtccagcgccagaaacaggcccagcgccagcaggaacgcgggcgcgcacatttccccgaaaagtgccacctgggatgaatgtcagctactgggctatctggacaagggaaaacgcaagcgcaaagagaaagcaggtagcttgcagtgggcttacatggcgatagctagactgggcggttttatggacagcaagcgaaccggaattgccagctggggcgccctctggtaaggttgggaagccctgcaaagtaaactggatggctttcttgccgccaaggatctgatggcgcaggggatcaagatctgatcaagagacaggatgaggatcgtttcgcatgattgaacaagatggattgcacgcaggttctccggccgcttgggtggagaggctattcggctatgactgggcacaacagacaatcggctgctctgatgccgccgtgttccggctgtcagcgcaggggcgcccggttctttttgtcaagaccgacctgtccggtgccctgaatgaactgcaagacgaggcagcgcggctatcgtggctggccacgacgggcgttccttgcgcagctgtgctcgacgttgtcactgaagcgggaagggactggctgctattgggcgaagtgccggggcaggatctcctgtcatctcaccttgctcctgccgagaaagtatccatcatggctgatgcaatgcggcggctgcatacgcttgatccggctacctgcccattcgaccaccaagcgaaacatcgcatcgagcgagcacgtactcggatggaagccggtcttgtcgatcaggatgatctggacgaagagcatcaggggctcgcgccagccgaactgttcgccaggctcaaggcgcgcatgcccgacggcgaggatctcgtcgtgacccatggcgatgcctgcttgccgaatatcatggtggaaaatggccgcttttctggattcatcgactgtggccggctgggtgtggcggaccgctatcaggacatagcgttggctacccgtgatattgctgaagagcttggcggcgaatgggctgaccgcttcctcgtgctttacggtatcgccgctcccgattcgcagcgcatcgccttctatcgccttcttgacgagttcttctgagcgggactctggggttcgaaatgaccgaccaagcgacgcccaacctgccatcacgagatttcgattccaccgccgccttctatgaaaggttgggcttcggaatcgttttccgggacgccggctggatgatcctccagcgcggggatctcatgctggagttcttcgcccacccccatgggcaaatattatacgcaaggcgacaaggtgctgatgccgctggcgattcaggttcatcatgccgtttgtgatggcttccatgtcggcagaatgcttaatgaattacaacagtttttatgcatgcgcccaatacgcaaaccgcctctccccgcgcgttggccgattcattaatgcagctggcacgacaggtttcccgactggtggataaccgtattaccgcctttgagtgagctgataccgctcgccgcagccgaacgaccgagcgcagcgagtcagtgagcgaggacacaagctttgacagctagctcagtcctaggtataatactagcgtcgacgtggagatataccatgggtgaactgccgagtaggtagctgataactgggaggattcataaagcattgtttgttggctgtgaactgccgagtaggtagctgataacggatccgaattcgagcgaaggagatatacatatgtttttgcaaagacctaaaccttacagcgatgaaagtttagaaagtttctttatccgagtggctaacaaaaatggctacggtgatgtccatcgcttcctagaagccactaaacgattccttcaagacattgaccataatggctatcaaacctttccgactgatataactcggataaacccatactcagctaaaaacagttccagcgcacgaactgcgtcattcctgaaacttgcacaattgacatttaatgaaccgccagagctacttgggttggcaattaacagaacaaacatgaaatactcgccgtcaactagcgcggttgttagaggtgcagaagtctttcctcgcagtttactacggacgcactccatcccctgctgtcctttgtgtctgcgagaaaatggctacgcctcctacctttggcactttcaggggtacgaatactgccacagccataacgtacctttaattaccacttgtagctgtggtaaggagtttgactaccgagtatctgggttaaagggcatttgctgcaaatgcaaggagcctatcaccttaaccagcagggagaacggtcatgaggcagcgtgtactgtttcaaactggcttgctggccatgaatctaaacctctgccaaatcttcctaaaagctaccgatggggtttagttcattggtggatgggtattaaagatagcgagttcgatcacttttcgttcgttcaatttttctcaaactggccaaggtcattccactcgataatcgaagatgaagtagagttcaaccttgagcatgctgttgtcagcacgtctgaattacgactaaaagatcttcttggtcgattgtttttcggttcaattcggttacctgagcggaatcttcaacacaatatcatccttggtgagcttctctgctatttagaaaatcgtttatggcaagacaagggattaatcgccaacctcaaaatgaacgcgttagaggcgactgtaatgttaaattgtagcctcgatcagattgcatcaatggttgaacaacgcatcttgaagccaaatcgaaaaagcaagcccaacagccctcttgatgttaccgattatctatttcatttcggcgatattttctgtctttggttagctgagttccaaagcgatgagtttaaccgttcgttttatgtgtcgaggtggtaaatgcaaactctgaaagaactaatcgcatccaatcctgacgacttaacaactgaacttaagagagcatttcgtccactcacaccgcatattgcaattgatggtaatgaacttgacgcactgacgatattagtcaatttaaccgataagactgatgatcagaaagacctgctcgatcgagccaaatgcaagcaaaaacttcgagatgaaaaatggtgggctagctgcataaattgcgttaattacagacaaagccataacccaaaattcccggatatacgttctgaaggcgtgattcgaacccaagccctgggtgaattaccgagtttcctactctcgtcctcaaaaatcccaccataccattggtcatatagccatgattcaaaatacgtcaacaaaagcgcattcctcaccaatgagttttgttgggatggtgagatctcatgtttgggtgagcttcttaaagatgcagatcacccactttggaatactttgaaaaagttaggttgttctcaaaaaacttgcaaagcaatggcaaaacaactagctgatattactctcacgactatcaatgtcacactcgcaccaaattacctgactcaaatatctctccccgatagtgatacatcctacatttcactctctcctgttgcatcgctatcgatgcaaagccactttcatcagaggctccaagatgaaaatcggcatagcgcgataacgcggtttagccgaactaccaacatgggggtcactgcgatgacatgtggcggcgcatttagaatgttaaagtctggcgctaagttttccagcccccctcatcaccgattaaacagtaaacgaagttggttgacgtcagagcatgttcagtcattaaaacagtaccagcgcctcaacaaaagcctcatacctgaaaactctcggattgcactccgtagaaaatacaaaatcgagcttcaaaatatggtcagatcttggtttgcaatgcaagaccatacccttgattcgaacatacttatccaacatttgaatcatgacctatcttacttaggagccacaaaacgttttgcatacgatccagcgatgaccaagctctttactgagcttttgaaacgagagttatcaaattcaatcaataatggtgagcaacacactaatggatcgtttttagtcctaccgaatatcagggtttgtggcgcaacagctttaagctccccggtaacggtggggattccatcacttacagctttctttggcttcgttcacgcatttgaacggaatataaatcgcaccacctcatcgtttcgtgttgaatcctttgcgatatgcgtccatcaactacatgtcgagaagcgaggtttgacagcagagtttgtggaaaaaggcgacgggactatatccgctcccgcgacccgggatgactggcagtgtgatgtcgtatttagccttattttgaacaccaactttgctcaacatattgaccaagatacgttagttacatcactaccaaagcgattggctcggggttcagcaaaaattgcgattgatgactttaaacatatcaactcattctcgacattagaaacagcgatcgaatctctgccaatagaagctggtaggtggttatcactttacgcacagtcaaacaataatctaagtgatctattagcagccatgacagaggaccatcagctcatggcaagctgcgtcggttaccacttgttagaagagcccaaagataaaccaaactccctcagaggttacaaacacgctatcgccgagtgcatcattggactcattaactcaatcacctttagctcagagactgatcccaacacaatcttttggtcgctaaagaactatcaaaactacctagtggtacagccaaggagtatcaacgatgaaactaccgacaaatctagcctatgagcgctctatcgacccatcagatgtctgtttttttgtcgtctggcccgatgatagaaaaacacctttaacctacaattctcgtactctgctcgggcaaatggaagcggcatcattagcctatgatgtctcaggtcaaccaataaaaagtgccaccgctgaggcgttagctcaagggaaccctcatcaagttgatttctgccacgttccatacggtgcgagtcatattgaatgcagtttctccgtctcgttttcttctgaactacgtcaaccatataagtgtaactcaagcaaagttaaacaaacgctagtgcaattagtcgagctctacgaaacgaaaatcggctggactgagctagcaacccgatatttgatgaacatttgcaacggtaaatggctgtggaaaaatacccgtaaagcctattgctggaacattgtacttacaccttggccttggaacggggaaaaggttggatttgaagatattcgtactaactacacctcacggcaagactttaaaaataataaaaattggtctgctatagttgaaatgatcaaaaccgcattttctagtactgatgggctggcgatatttgaagtcagggccaccttgcacttgccaacgaatgctatggtgcggccaagccaagttttcacagaaaaagaaagtggcagtaaaagtaaatctaaaactcaaaacagtcgagtttttcagagtacaactattgatggtgaacgatcgccaatactaggggcctttaaaacgggagcagctattgcaaccattgacgactggtatcctgaagccactgagccactaagggtcggacggtttggggttcatcgcgaagatgtcacttgctaccgtcatccgtctaccggaaaagattttttctcgatattacaacaagcagagcactatattgaagtgttgagcgccaacaaaactcccgctcaagaaactatcaacgacatgcactttttaatggctaacctgattaagggtgggatgttccagcataaaggagactgactgtgaaatggtattataagacaatcacctttctgccagagttgtgcaacaacgagtcactggctgcaaagtgtctccgcgttctgcatggatttaactatcagtatgagacacgaaatatcggcgtttcatttccgctttggtgtgatgcaacggttggaaaaaagatttcatttgtcagcaagaacaagatagaactcgacttactacttaaacaacactatttcgtccaaatggaacaacttcaatactttcatatatccaacactgttctcgtcccagaagattgtacatacgtttcctttagacgctgtcaatctatagataagctcacagcagcagggctggcaaggaaaatcagacgcctggagaaacgtgctctatctagaggcgagcaatttgacccatcatcttttgctcaaaaagagcatactgcaatagcgcactaccactcacttggggagtccagcaaacagacgaaccgcaactttcgactcaatatcaggatgctctcggagcaaccccgtgaggggaactcgatttttagtagctatggcttatcaaattcagaaaactcgtttcagcctgtacccttaatctgacctttaataaggagatataccatggcgacaagtttacctacgccctcagcaattacgacttcggcgttagagtatgcattccatactcccgctcgcaatctaacgaaatctcgcggaaaaaacattcatcgttatgtcagtgtaaagatgagtaagaggattacggtagaatctactctagagtgtgatgcctgctatcactttgattttgagccaagtattgttcgcttttgcgctcaaccgattcgatttttatattatctcaatggtcagtctcactcctatgttcctgactttctagttcaatttgataccaacgagtttgttctatatgaagtaaagtcagcttatgctaagaacaaacctgattttgatgttgaatgggaggcgaaagtaaaagcagcaactgaactagggctagaattggagcttgttgaagagagtgatattagggatacggttgtattaaataatcttaagcgcatgcatcgttatgcttcgaaagatgagctgaataacgtacataactctctcttaaaaataataaagtacaatggcgcccaatctgcaagatgcttgggagaacagttgggtttaaaaggccgaactgttttaccaattttgtgcgatttgctgtcaaggtgtttactcgatacacgtttggataagcctctatctcttgaatctcgatttgagttggccagttatggctaagaaagggttctcaagtttccatagaaaagcagtctcttcccaagatacgcttgaatcgatagagcttgtctctagcgctaattgtctagaaagtgttacgtatcaagatatatcagcatttcccgaaacaattgcggtagagattaatttccgattaagcattcttcgctttttagcgcgaaagtgcgaaaccattgtggccaaatcaattgaaccacatcgtgtagagctacagcaaaactatagtagaaaaatacccagtgcaataacgatatatcgatggtggcttgcttttcgaaaatcagactacaaccccattagcttagcacctaatatcaaggatagaggtaatagagagacaaaagtgtcaacagttgttgattctattatggaacaggcagttgaaagagttatatctggacgaaaagtcaatgttagctctgcatataaacgtgttcgacgaaaagttcgtcaatacaatctaactcatggaacgaaatacacgtatcctaagtacgaatctgtaagaaagcgagtaaaaaagaaaaccccatttgagttattagccgcagggaaaggggagagagtagctaagagagagtttcgccgaatgggaaaaaagatcctcacgtctagcgtgctagagagggttgaaatagatcacactgtcgttgacctttttgcagtacacgaagagtatcgaatcccattgggccgaccttggcttactcaattggttgattgttacagtaaagctgtaatcggtttttatttaggtttcgagcctcctagctatgtgtcggtttcccttgcacttaagaatgcaatacaacgcaaagatgacttaatctcctcgtatgaatcgatcgagaatgaatggctatgttatggcatcccagacctactcgtaactgataatggtaaagagtttttgtcgaaagcatttgatcaagcatgtgaatcactattgatcaatgtgcatcaaaataaagttgagacgcccgacaacaaacctcatgttgaacgtaactacgggactattaatacttctctgttagacgatttacctgggaaatccttcagccagtaccttcaaagagaagggtacgactctgtgggagaagctacccttacactcaatgagattagagaaatttacttaatttggttggtggatatttatcataaaaaacccaatcagagaggcactaattgtcctaatgttgcgtggaaaaagggttgtcaagaatgggaaccagaggagttctctggttctaaagacgaattagactttaaatttgctattgttgattacaaacaacttactaaagtagggataactgtctacaaagaactgagttatagcaatgaccgtttagctgaatatagagggaagaaaggaaaccataaagttcagttcaagtataaccctgagtgtatggcagttatttgggtgttggatgaggatatgaatgagtactttacagttaatgcgattgactacgaatatgcaagtagagtatcactttggcaacataaatataacatgaaatatcaagcagaactaaattcagcagaatatgatgaggacaaggaaattgatgcagaaataaaaattgaagaaatcgcagatcgttcaattgttaagactaacaaaatcagagctcggaggcgtggcgctaggcatcaagagaatagcgcaagggctaagtcaatcagtaatgcgaacccggcctcgatacaaaaacatgaagatgaaatcgttagtgcagataatgacgattgggatattgattatgtctgagaaatcgtcaaatgagtgaaacgcgtgaggctcgtatatcaagagctaaaagggcatttgtatccacaccgagcgttaggaaaatcttgagttacatggatagatgtagagatctatcagacctagagtctgagcctacatgcatgatggtctatggtgcttcgggtgtaggtaaaacgaccgtcatcaagaaatacttaaatcaaaacagaagagagtccgaagccgggggcgatataataccggttttgcatattgagttgccagacaatgcgaagccagtagatgcagcaagggaattgctggttgaaatgggtgacccgctagcactttatgaaactgacttagctagattgacgaaaagactgactgaattaatccctgcggtcggcgtgaagctgattattatcgatgagttccaacatttggtggaagaaaggtcaaatcgggttcttacccaagtaggtaattggctaaaaatgatacttaacaaaacgaaatgtccaattgttatatttggtatgccatactcaaaagttgtactgcaagcaaactcgcaacttcacgggcgattttccattcaggttgaactgcgcccctttagctaccagggaggtagaggtgtatttaaaacttttttggaataccttgataaagccctaccttttgaaaaacaggctggcttagccaacgaaagtttgcagaaaaaattgtatgcattctctcagggaaacatgcgttcgttgagaaaccttatttatcaagcatctatcgaagcaattgataatcagcatgagacgataaccgaagaagatttcgtttttgcatcgaagttgacatcgggcgataaacccaactcatggaaaaatccttttgaggagggtgttgaggtaacagaagatatgttacgaccgccaccaaaagatattggttgggaggactatttgagacattcaaccccgagagtgagtaaaccaggtagaaataaaaactttttcgaataacctaggctgctgcgctgctgccaccgctgagcaataactagcataaccccttggggcctctaaacgggtcttgaggggttttttgctgaaacctcaggcatgttggaacaaccataaaatgataattacacccataaattgataattatcacacccataaattgatattgcctcttcatggtctaaacttcagtaagtttacgacattttcatgaagaggtcatttccggggatccatggagaaaaaaatcactggatataccaccgttgatatatcccaatggcatcgtaaagaacattttgaggcatttcagtcagttgctcaatgtacctataaccagaccgttcagctggatattacggcctttttaaagaccgtaaagaaaaataagcacaagttttatccggcctttattcacattcttgcccgcctgatgaatgctcatccggagttccgtatggcaatgaaagacggtgagctggtgatatgggatagtgttcacccttgttacaccgttttccatgagcaaactgaaacgttttcatcgctctggagtgaataccacgacgatttccggcagtttctacacatatattcgcaagatgtggcgtgttacggtgaaaacctggcctatttccctaaagggtttattgagaatatgtttttcgtctcagccaatccctgggtgagtttcaccagttttgatttaaacgtggccaatatggacaacttcttcgcccccgttttcactatgggcaaatattatacgcaaggcgacaaggtgctgatgccgctggcgattcaggttcatcatgccgtttgtgatggcttccatgtcggcagaatgcttaatgaattacaacagtactgcgatgagtggcagggcggggcgtaatttttttaaggcagttattggtgcccttctagagtccttactgcagtagttttgctgaaatactcgattcacaaaaatatcaacttatggttgttttgtgagatatcaatatatggttgttttgtggttaagttgctgattataaataattattaaatatcactttatggttgcatcaacaggtaccgagctcgaattcactggccgtcgttttacaacgtcgtgactgggaaaaccctggcgttacccaacttaatcgccttgcggccagtttgctcaggctctccccgtggaggtaataattgacgatatgatcatttattctgcctcccagagcctgataaaaacggtgaatccgttagcgaggtgccgccggcttccattcaggtcgaggtggcccggctccatgcaccgcgacgcaacgcggggaggcagacaaggtatagggcggcgaggcggctacagccgatagtctggaacagcgcacttacgggttgctgcgcaacccaagtgctaccggcgcggcagcgtgacccgtgtcggcggctccaacggctcgccatcgtccagaaaacacggctcatcgggcatcggcaggcgctgctgcccgcgccgttcccattcctccgtttcggtcaaggctggcaggtctggttccatgcccggaatgccgggctggctgggcggctcctcgccggggccggtcggtagttgctgctcgcccggatacagggtcgggatgcggcgcaggtcgccatgccccaacagcgattcgtcctggtcgtcgtgatcaaccaccacggcggcactgaacaccgacaggcgcaactggtcgcggggctggccccacgccacgcggtcattgaccacgtaggccgacacggtgccggggccgttgagcttcacgacggagatccagcgctcggccaccaagtccttgactgcgtattggaccgtccgcaaagaacgtccgatgagcttggaaagtgtcttctggctgaccaccacggcgttctggtggcccatctgcgccacgaggtgatgcagcagcattg

SEQ ID NO: 89 - DNA, 14028 bp, artificial sequence
  Synthetic
ccgccgtgggtttcctcgcaataagcccggcccacgcctcatgcgctttgcgttccgtttgcacccagtgaccgggcttgttcttggcttgaatgccgatttctctggactgcgtggccatgcttatctccatgcggtaggggtgccgcacggttgcggcaccatgcgcaatcagctgcaacttttcggcagcgcgacaacaattatgcgttgcgtaaaagtggcagtcaattacagattttctttaacctacgcaatgagctattgcggggggtgccgcaatgagctgttgcgtaccccccttttttaagttgttgatttttaagtctttcgcatttcgccctatatctagttctttggtgcccaaagaagggcacccctgcggggttcccccacgccttcggcgcggctccccctccggcaaaaagtggcccctccggggcttgttgatcgactgcgcggccttcggccttgcccaaggtggcgctgcccccttggaacccccgcactcgccgccgtgaggctcggggggcaggcgggcgggcttcgcccttcgactgcccccactcgcataggcttgggtcgttccaggcgcgtcaaggccaagccgctgcgcggtcgctgcgcgagccttgacccgccttccacttggtgtccaaccggcaagcgaagcgcgcaggccgcaggccggaggcttttccccagagaaaattaaaaaaattgatggggcaaggccgcaggccgcgcagttggagccggtgggtatgtggtcgaaggctgggtagccggtgggcaatccctgtggtcaagctcgtgggcaggcgcagcctgtccatcagcttgtccagcagggttgtccacgggccgagcgaagcgagccagccggtggccgctcgcggccatcgtccacatatccacgggctggcaagggagcgcagcgaccgcgcagggcgaagcccggagagcaagcccgtagggcgccgcagccgccgtaggcggtcacgactttgcgaagcaaagtctagtgagtatactcaagcattgagtggcccgccggaggcaccgccttgcgctgcccccgtcgagccggttggacaccaaaagggaggggcaggcatggcggcatacgcgatcatgcgatgcaagaagctggcgaaaatgggcaacgtggcggccagtctcaagcacgcctaccgcgagcgcgagacgcccaacgctgacgccagcaggacgccagagaacgagcactgggcggccagcagcaccgatgaagcgatgggccgactgcgcgagttgctgccagagaagcggcgcaaggacgctgtgttggcggtcgagtacgtcatgacggccagcccggaatggtggaagtcggccagccaagaacagcaggcggcgttcttcgagaaggcgcacaagtggctggcggacaagtacggggcggatcgcatcgtgacggccagcatccaccgtgacgaaaccagcccgcacatgaccgcgttcgtggtgccgctgacgcaggacggcaggctgtcggccaaggagttcatcggcaacaaagcgcagatgacccgcgaccagaccacgtttgcggccgctgtggccgatctagggctgcaacggggcatcgagggcagcaaggcacgtcacacgcgcattcaggcgttctacgaggccctggagcggccaccagtgggccacgtcaccatcagcccgcaagcggtcgagccacgcgcctatgcaccgcagggattggccgaaaagctgggaatctcaaagcgcgttgagacgccggaagccgtggccgaccggctgacaaaagcggttcggcaggggtatgagcctgccctacaggccgccgcaggagcgcgtgagatgcgcaagaaggccgatcaagcccaagagacggcccgtgaccttcgggagcgcctgaagcccgttctggacgccctggggccgttgaatcgggatatgcaggccaaggccgccgcgatcatcaaggccgtgggcgaaaagctgctgacggaacagcgggaagtccagcgccagaaacaggcccagcgccagcaggaacgcgggcgcgcacatttccccgaaaagtgccacctgggatgaatgtcagctactgggctatctggacaagggaaaacgcaagcgcaaagagaaagcaggtagcttgcagtgggcttacatggcgatagctagactgggcggttttatggacagcaagcgaaccggaattgccagctggggcgccctctggtaaggttgggaagccctgcaaagtaaactggatggctttcttgccgccaaggatctgatggcgcaggggatcaagatctgatcaagagacaggatgaggatcgtttcgcatgattgaacaagatggattgcacgcaggttctccggccgcttgggtggagaggctattcggctatgactgggcacaacagacaatcggctgctctgatgccgccgtgttccggctgtcagcgcaggggcgcccggttctttttgtcaagaccgacctgtccggtgccctgaatgaactgcaagacgaggcagcgcggctatcgtggctggccacgacgggcgttccttgcgcagctgtgctcgacgttgtcactgaagcgggaagggactggctgctattgggcgaagtgccggggcaggatctcctgtcatctcaccttgctcctgccgagaaagtatccatcatggctgatgcaatgcggcggctgcatacgcttgatccggctacctgcccattcgaccaccaagcgaaacatcgcatcgagcgagcacgtactcggatggaagccggtcttgtcgatcaggatgatctggacgaagagcatcaggggctcgcgccagccgaactgttcgccaggctcaaggcgcgcatgcccgacggcgaggatctcgtcgtgacccatggcgatgcctgcttgccgaatatcatggtggaaaatggccgcttttctggattcatcgactgtggccggctgggtgtggcggaccgctatcaggacatagcgttggctacccgtgatattgctgaagagcttggcggcgaatgggctgaccgcttcctcgtgctttacggtatcgccgctcccgattcgcagcgcatcgccttctatcgccttcttgacgagttcttctgagcgggactctggggttcgaaatgaccgaccaagcgacgcccaacctgccatcacgagatttcgattccaccgccgccttctatgaaaggttgggcttcggaatcgttttccgggacgccggctggatgatcctccagcgcggggatctcatgctggagttcttcgcccacccccatgggcaaatattatacgcaaggcgacaaggtgctgatgccgctggcgattcaggttcatcatgccgtttgtgatggcttccatgtcggcagaatgcttaatgaattacaacagtttttatgcatgcgcccaatacgcaaaccgcctctccccgcgcgttggccgattcattaatgcagctggcacgacaggtttcccgactggtggataaccgtattaccgcctttgagtgagctgataccgctcgccgcagccgaacgaccgagcgcagcgagtcagtgagcgaggacacaagctttgacagctagctcagtcctaggtataatactagcgtcgacgtggagatataccatgggtgaactgccgagtaggtagctgataacgcattactaagctggcgcgtgaagctgtagaagtgaactgccgagtaggtagctgataacggatccgaattcgagcgaaggagatatacatatgtttttgcaaagacctaaaccttacagcgatgaaagtttagaaagtttctttatccgagtggctaacaaaaatggctacggtgatgtccatcgcttcctagaagccactaaacgattccttcaagacattgaccataatggctatcaaacctttccgactgatataactcggataaacccatactcagctaaaaacagttccagcgcacgaactgcgtcattcctgaaacttgcacaattgacatttaatgaaccgccagagctacttgggttggcaattaacagaacaaacatgaaatactcgccgtcaactagcgcggttgttagaggtgcagaagtctttcctcgcagtttactacggacgcactccatcccctgctgtcctttgtgtctgcgagaaaatggctacgcctcctacctttggcactttcaggggtacgaatactgccacagccataacgtacctttaattaccacttgtagctgtggtaaggagtttgactaccgagtatctgggttaaagggcatttgctgcaaatgcaaggagcctatcaccttaaccagcagggagaacggtcatgaggcagcgtgtactgtttcaaactggcttgctggccatgaatctaaacctctgccaaatcttcctaaaagctaccgatggggtttagttcattggtggatgggtattaaagatagcgagttcgatcacttttcgttcgttcaatttttctcaaactggccaaggtcattccactcgataatcgaagatgaagtagagttcaaccttgagcatgctgttgtcagcacgtctgaattacgactaaaagatcttcttggtcgattgtttttcggttcaattcggttacctgagcggaatcttcaacacaatatcatccttggtgagcttctctgctatttagaaaatcgtttatggcaagacaagggattaatcgccaacctcaaaatgaacgcgttagaggcgactgtaatgttaaattgtagcctcgatcagattgcatcaatggttgaacaacgcatcttgaagccaaatcgaaaaagcaagcccaacagccctcttgatgttaccgattatctatttcatttcggcgatattttctgtctttggttagctgagttccaaagcgatgagtttaaccgttcgttttatgtgtcgaggtggtaaatgcaaactctgaaagaactaatcgcatccaatcctgacgacttaacaactgaacttaagagagcatttcgtccactcacaccgcatattgcaattgatggtaatgaacttgacgcactgacgatattagtcaatttaaccgataagactgatgatcagaaagacctgctcgatcgagccaaatgcaagcaaaaacttcgagatgaaaaatggtgggctagctgcataaattgcgttaattacagacaaagccataacccaaaattcccggatatacgttctgaaggcgtgattcgaacccaagccctgggtgaattaccgagtttcctactctcgtcctcaaaaatcccaccataccattggtcatatagccatgattcaaaatacgtcaacaaaagcgcattcctcaccaatgagttttgttgggatggtgagatctcatgtttgggtgagcttcttaaagatgcagatcacccactttggaatactttgaaaaagttaggttgttctcaaaaaacttgcaaagcaatggcaaaacaactagctgatattactctcacgactatcaatgtcacactcgcaccaaattacctgactcaaatatctctccccgatagtgatacatcctacatttcactctctcctgttgcatcgctatcgatgcaaagccactttcatcagaggctccaagatgaaaatcggcatagcgcgataacgcggtttagccgaactaccaacatgggggtcactgcgatgacatgtggcggcgcatttagaatgttaaagtctggcgctaagttttccagcccccctcatcaccgattaaacagtaaacgaagttggttgacgtcagagcatgttcagtcattaaaacagtaccagcgcctcaacaaaagcctcatacctgaaaactctcggattgcactccgtagaaaatacaaaatcgagcttcaaaatatggtcagatcttggtttgcaatgcaagaccatacccttgattcgaacatacttatccaacatttgaatcatgacctatcttacttaggagccacaaaacgttttgcatacgatccagcgatgaccaagctctttactgagcttttgaaacgagagttatcaaattcaatcaataatggtgagcaacacactaatggatcgtttttagtcctaccgaatatcagggtttgtggcgcaacagctttaagctccccggtaacggtggggattccatcacttacagctttctttggcttcgttcacgcatttgaacggaatataaatcgcaccacctcatcgtttcgtgttgaatcctttgcgatatgcgtccatcaactacatgtcgagaagcgaggtttgacagcagagtttgtggaaaaaggcgacgggactatatccgctcccgcgacccgggatgactggcagtgtgatgtcgtatttagccttattttgaacaccaactttgctcaacatattgaccaagatacgttagttacatcactaccaaagcgattggctcggggttcagcaaaaattgcgattgatgactttaaacatatcaactcattctcgacattagaaacagcgatcgaatctctgccaatagaagctggtaggtggttatcactttacgcacagtcaaacaataatctaagtgatctattagcagccatgacagaggaccatcagctcatggcaagctgcgtcggttaccacttgttagaagagcccaaagataaaccaaactccctcagaggttacaaacacgctatcgccgagtgcatcattggactcattaactcaatcacctttagctcagagactgatcccaacacaatcttttggtcgctaaagaactatcaaaactacctagtggtacagccaaggagtatcaacgatgaaactaccgacaaatctagcctatgagcgctctatcgacccatcagatgtctgtttttttgtcgtctggcccgatgatagaaaaacacctttaacctacaattctcgtactctgctcgggcaaatggaagcggcatcattagcctatgatgtctcaggtcaaccaataaaaagtgccaccgctgaggcgttagctcaagggaaccctcatcaagttgatttctgccacgttccatacggtgcgagtcatattgaatgcagtttctccgtctcgttttcttctgaactacgtcaaccatataagtgtaactcaagcaaagttaaacaaacgctagtgcaattagtcgagctctacgaaacgaaaatcggctggactgagctagcaacccgatatttgatgaacatttgcaacggtaaatggctgtggaaaaatacccgtaaagcctattgctggaacattgtacttacaccttggccttggaacggggaaaaggttggatttgaagatattcgtactaactacacctcacggcaagactttaaaaataataaaaattggtctgctatagttgaaatgatcaaaaccgcattttctagtactgatgggctggcgatatttgaagtcagggccaccttgcacttgccaacgaatgctatggtgcggccaagccaagttttcacagaaaaagaaagtggcagtaaaagtaaatctaaaactcaaaacagtcgagtttttcagagtacaactattgatggtgaacgatcgccaatactaggggcctttaaaacgggagcagctattgcaaccattgacgactggtatcctgaagccactgagccactaagggtcggacggtttggggttcatcgcgaagatgtcacttgctaccgtcatccgtctaccggaaaagattttttctcgatattacaacaagcagagcactatattgaagtgttgagcgccaacaaaactcccgctcaagaaactatcaacgacatgcactttttaatggctaacctgattaagggtgggatgttccagcataaaggagactgactgtgaaatggtattataagacaatcacctttctgccagagttgtgcaacaacgagtcactggctgcaaagtgtctccgcgttctgcatggatttaactatcagtatgagacacgaaatatcggcgtttcatttccgctttggtgtgatgcaacggttggaaaaaagatttcatttgtcagcaagaacaagatagaactcgacttactacttaaacaacactatttcgtccaaatggaacaacttcaatactttcatatatccaacactgttctcgtcccagaagattgtacatacgtttcctttagacgctgtcaatctatagataagctcacagcagcagggctggcaaggaaaatcagacgcctggagaaacgtgctctatctagaggcgagcaatttgacccatcatcttttgctcaaaaagagcatactgcaatagcgcactaccactcacttggggagtccagcaaacagacgaaccgcaactttcgactcaatatcaggatgctctcggagcaaccccgtgaggggaactcgatttttagtagctatggcttatcaaattcagaaaactcgtttcagcctgtacccttaatctgacctttaataaggagatataccatggcgacaagtttacctacgccctcagcaattacgacttcggcgttagagtatgcattccatactcccgctcgcaatctaacgaaatctcgcggaaaaaacattcatcgttatgtcagtgtaaagatgagtaagaggattacggtagaatctactctagagtgtgatgcctgctatcactttgattttgagccaagtattgttcgcttttgcgctcaaccgattcgatttttatattatctcaatggtcagtctcactcctatgttcctgactttctagttcaatttgataccaacgagtttgttctatatgaagtaaagtcagcttatgctaagaacaaacctgattttgatgttgaatgggaggcgaaagtaaaagcagcaactgaactagggctagaattggagcttgttgaagagagtgatattagggatacggttgtattaaataatcttaagcgcatgcatcgttatgcttcgaaagatgagctgaataacgtacataactctctcttaaaaataataaagtacaatggcgcccaatctgcaagatgcttgggagaacagttgggtttaaaaggccgaactgttttaccaattttgtgcgatttgctgtcaaggtgtttactcgatacacgtttggataagcctctatctcttgaatctcgatttgagttggccagttatggctaagaaagggttctcaagtttccatagaaaagcagtctcttcccaagatacgcttgaatcgatagagcttgtctctagcgctaattgtctagaaagtgttacgtatcaagatatatcagcatttcccgaaacaattgcggtagagattaatttccgattaagcattcttcgctttttagcgcgaaagtgcgaaaccattgtggccaaatcaattgaaccacatcgtgtagagctacagcaaaactatagtagaaaaatacccagtgcaataacgatatatcgatggtggcttgcttttcgaaaatcagactacaaccccattagcttagcacctaatatcaaggatagaggtaatagagagacaaaagtgtcaacagttgttgattctattatggaacaggcagttgaaagagttatatctggacgaaaagtcaatgttagctctgcatataaacgtgttcgacgaaaagttcgtcaatacaatctaactcatggaacgaaatacacgtatcctaagtacgaatctgtaagaaagcgagtaaaaaagaaaaccccatttgagttattagccgcagggaaaggggagagagtagctaagagagagtttcgccgaatgggaaaaaagatcctcacgtctagcgtgctagagagggttgaaatagatcacactgtcgttgacctttttgcagtacacgaagagtatcgaatcccattgggccgaccttggcttactcaattggttgattgttacagtaaagctgtaatcggtttttatttaggtttcgagcctcctagctatgtgtcggtttcccttgcacttaagaatgcaatacaacgcaaagatgacttaatctcctcgtatgaatcgatcgagaatgaatggctatgttatggcatcccagacctactcgtaactgataatggtaaagagtttttgtcgaaagcatttgatcaagcatgtgaatcactattgatcaatgtgcatcaaaataaagttgagacgcccgacaacaaacctcatgttgaacgtaactacgggactattaatacttctctgttagacgatttacctgggaaatccttcagccagtaccttcaaagagaagggtacgactctgtgggagaagctacccttacactcaatgagattagagaaatttacttaatttggttggtggatatttatcataaaaaacccaatcagagaggcactaattgtcctaatgttgcgtggaaaaagggttgtcaagaatgggaaccagaggagttctctggttctaaagacgaattagactttaaatttgctattgttgattacaaacaacttactaaagtagggataactgtctacaaagaactgagttatagcaatgaccgtttagctgaatatagagggaagaaaggaaaccataaagttcagttcaagtataaccctgagtgtatggcagttatttgggtgttggatgaggatatgaatgagtactttacagttaatgcgattgactacgaatatgcaagtagagtatcactttggcaacataaatataacatgaaatatcaagcagaactaaattcagcagaatatgatgaggacaaggaaattgatgcagaaataaaaattgaagaaatcgcagatcgttcaattgttaagactaacaaaatcagagctcggaggcgtggcgctaggcatcaagagaatagcgcaagggctaagtcaatcagtaatgcgaacccggcctcgatacaaaaacatgaagatgaaatcgttagtgcagataatgacgattgggatattgattatgtctgagaaatcgtcaaatgagtgaaacgcgtgaggctcgtatatcaagagctaaaagggcatttgtatccacaccgagcgttaggaaaatcttgagttacatggatagatgtagagatctatcagacctagagtctgagcctacatgcatgatggtctatggtgcttcgggtgtaggtaaaacgaccgtcatcaagaaatacttaaatcaaaacagaagagagtccgaagccgggggcgatataataccggttttgcatattgagttgccagacaatgcgaagccagtagatgcagcaagggaattgctggttgaaatgggtgacccgctagcactttatgaaactgacttagctagattgacgaaaagactgactgaattaatccctgcggtcggcgtgaagctgattattatcgatgagttccaacatttggtggaagaaaggtcaaatcgggttcttacccaagtaggtaattggctaaaaatgatacttaacaaaacgaaatgtccaattgttatatttggtatgccatactcaaaagttgtactgcaagcaaactcgcaacttcacgggcgattttccattcaggttgaactgcgcccctttagctaccagggaggtagaggtgtatttaaaacttttttggaataccttgataaagccctaccttttgaaaaacaggctggcttagccaacgaaagtttgcagaaaaaattgtatgcattctctcagggaaacatgcgttcgttgagaaaccttatttatcaagcatctatcgaagcaattgataatcagcatgagacgataaccgaagaagatttcgtttttgcatcgaagttgacatcgggcgataaacccaactcatggaaaaatccttttgaggagggtgttgaggtaacagaagatatgttacgaccgccaccaaaagatattggttgggaggactatttgagacattcaaccccgagagtgagtaaaccaggtagaaataaaaactttttcgaataacctaggctgctgcgctgctgccaccgctgagcaataactagcataaccccttggggcctctaaacgggtcttgaggggttttttgctgaaacctcaggcatgttggaacaaccataaaatgataattacacccataaattgataattatcacacccataaattgatattgcctcttcatggtctaaacttcagtaagtttacgacattttcatgaagaggtcatttccggggatccatggagaaaaaaatcactggatataccaccgttgatatatcccaatggcatcgtaaagaacattttgaggcatttcagtcagttgctcaatgtacctataaccagaccgttcagctggatattacggcctttttaaagaccgtaaagaaaaataagcacaagttttatccggcctttattcacattcttgcccgcctgatgaatgctcatccggagttccgtatggcaatgaaagacggtgagctggtgatatgggatagtgttcacccttgttacaccgttttccatgagcaaactgaaacgttttcatcgctctggagtgaataccacgacgatttccggcagtttctacacatatattcgcaagatgtggcgtgttacggtgaaaacctggcctatttccctaaagggtttattgagaatatgtttttcgtctcagccaatccctgggtgagtttcaccagttttgatttaaacgtggccaatatggacaacttcttcgcccccgttttcactatgggcaaatattatacgcaaggcgacaaggtgctgatgccgctggcgattcaggttcatcatgccgtttgtgatggcttccatgtcggcagaatgcttaatgaattacaacagtactgcgatgagtggcagggcggggcgtaatttttttaaggcagttattggtgcccttctagagtccttactgcagtagttttgctgaaatactcgattcacaaaaatatcaacttatggttgttttgtgagatatcaatatatggttgttttgtggttaagttgctgattataaataattattaaatatcactttatggttgcatcaacaggtaccgagctcgaattcactggccgtcgttttacaacgtcgtgactgggaaaaccctggcgttacccaacttaatcgccttgcggccagtttgctcaggctctccccgtggaggtaataattgacgatatgatcatttattctgcctcccagagcctgataaaaacggtgaatccgttagcgaggtgccgccggcttccattcaggtcgaggtggcccggctccatgcaccgcgacgcaacgcggggaggcagacaaggtatagggcggcgaggcggctacagccgatagtctggaacagcgcacttacgggttgctgcgcaacccaagtgctaccggcgcggcagcgtgacccgtgtcggcggctccaacggctcgccatcgtccagaaaacacggctcatcgggcatcggcaggcgctgctgcccgcgccgttcccattcctccgtttcggtcaaggctggcaggtctggttccatgcccggaatgccgggctggctgggcggctcctcgccggggccggtcggtagttgctgctcgcccggatacagggtcgggatgcggcgcaggtcgccatgccccaacagcgattcgtcctggtcgtcgtgatcaaccaccacggcggcactgaacaccgacaggcgcaactggtcgcggggctggccccacgccacgcggtcattgaccacgtaggccgacacggtgccggggccgttgagcttcacgacggagatccagcgctcggccaccaagtccttgactgcgtattggaccgtccgcaaagaacgtccgatgagcttggaaagtgtcttctggctgaccaccacggcgttctggtggcccatctgcgccacgaggtgatgcagcagcattg

SEQ ID NO: 90 - DNA, 14028 bp, artificial sequence
  Synthetic
ccgccgtgggtttcctcgcaataagcccggcccacgcctcatgcgctttgcgttccgtttgcacccagtgaccgggcttgttcttggcttgaatgccgatttctctggactgcgtggccatgcttatctccatgcggtaggggtgccgcacggttgcggcaccatgcgcaatcagctgcaacttttcggcagcgcgacaacaattatgcgttgcgtaaaagtggcagtcaattacagattttctttaacctacgcaatgagctattgcggggggtgccgcaatgagctgttgcgtaccccccttttttaagttgttgatttttaagtctttcgcatttcgccctatatctagttctttggtgcccaaagaagggcacccctgcggggttcccccacgccttcggcgcggctccccctccggcaaaaagtggcccctccggggcttgttgatcgactgcgcggccttcggccttgcccaaggtggcgctgcccccttggaacccccgcactcgccgccgtgaggctcggggggcaggcgggcgggcttcgcccttcgactgcccccactcgcataggcttgggtcgttccaggcgcgtcaaggccaagccgctgcgcggtcgctgcgcgagccttgacccgccttccacttggtgtccaaccggcaagcgaagcgcgcaggccgcaggccggaggcttttccccagagaaaattaaaaaaattgatggggcaaggccgcaggccgcgcagttggagccggtgggtatgtggtcgaaggctgggtagccggtgggcaatccctgtggtcaagctcgtgggcaggcgcagcctgtccatcagcttgtccagcagggttgtccacgggccgagcgaagcgagccagccggtggccgctcgcggccatcgtccacatatccacgggctggcaagggagcgcagcgaccgcgcagggcgaagcccggagagcaagcccgtagggcgccgcagccgccgtaggcggtcacgactttgcgaagcaaagtctagtgagtatactcaagcattgagtggcccgccggaggcaccgccttgcgctgcccccgtcgagccggttggacaccaaaagggaggggcaggcatggcggcatacgcgatcatgcgatgcaagaagctggcgaaaatgggcaacgtggcggccagtctcaagcacgcctaccgcgagcgcgagacgcccaacgctgacgccagcaggacgccagagaacgagcactgggcggccagcagcaccgatgaagcgatgggccgactgcgcgagttgctgccagagaagcggcgcaaggacgctgtgttggcggtcgagtacgtcatgacggccagcccggaatggtggaagtcggccagccaagaacagcaggcggcgttcttcgagaaggcgcacaagtggctggcggacaagtacggggcggatcgcatcgtgacggccagcatccaccgtgacgaaaccagcccgcacatgaccgcgttcgtggtgccgctgacgcaggacggcaggctgtcggccaaggagttcatcggcaacaaagcgcagatgacccgcgaccagaccacgtttgcggccgctgtggccgatctagggctgcaacggggcatcgagggcagcaaggcacgtcacacgcgcattcaggcgttctacgaggccctggagcggccaccagtgggccacgtcaccatcagcccgcaagcggtcgagccacgcgcctatgcaccgcagggattggccgaaaagctgggaatctcaaagcgcgttgagacgccggaagccgtggccgaccggctgacaaaagcggttcggcaggggtatgagcctgccctacaggccgccgcaggagcgcgtgagatgcgcaagaaggccgatcaagcccaagagacggcccgtgaccttcgggagcgcctgaagcccgttctggacgccctggggccgttgaatcgggatatgcaggccaaggccgccgcgatcatcaaggccgtgggcgaaaagctgctgacggaacagcgggaagtccagcgccagaaacaggcccagcgccagcaggaacgcgggcgcgcacatttccccgaaaagtgccacctgggatgaatgtcagctactgggctatctggacaagggaaaacgcaagcgcaaagagaaagcaggtagcttgcagtgggcttacatggcgatagctagactgggcggttttatggacagcaagcgaaccggaattgccagctggggcgccctctggtaaggttgggaagccctgcaaagtaaactggatggctttcttgccgccaaggatctgatggcgcaggggatcaagatctgatcaagagacaggatgaggatcgtttcgcatgattgaacaagatggattgcacgcaggttctccggccgcttgggtggagaggctattcggctatgactgggcacaacagacaatcggctgctctgatgccgccgtgttccggctgtcagcgcaggggcgcccggttctttttgtcaagaccgacctgtccggtgccctgaatgaactgcaagacgaggcagcgcggctatcgtggctggccacgacgggcgttccttgcgcagctgtgctcgacgttgtcactgaagcgggaagggactggctgctattgggcgaagtgccggggcaggatctcctgtcatctcaccttgctcctgccgagaaagtatccatcatggctgatgcaatgcggcggctgcatacgcttgatccggctacctgcccattcgaccaccaagcgaaacatcgcatcgagcgagcacgtactcggatggaagccggtcttgtcgatcaggatgatctggacgaagagcatcaggggctcgcgccagccgaactgttcgccaggctcaaggcgcgcatgcccgacggcgaggatctcgtcgtgacccatggcgatgcctgcttgccgaatatcatggtggaaaatggccgcttttctggattcatcgactgtggccggctgggtgtggcggaccgctatcaggacatagcgttggctacccgtgatattgctgaagagcttggcggcgaatgggctgaccgcttcctcgtgctttacggtatcgccgctcccgattcgcagcgcatcgccttctatcgccttcttgacgagttcttctgagcgggactctggggttcgaaatgaccgaccaagcgacgcccaacctgccatcacgagatttcgattccaccgccgccttctatgaaaggttgggcttcggaatcgttttccgggacgccggctggatgatcctccagcgcggggatctcatgctggagttcttcgcccacccccatgggcaaatattatacgcaaggcgacaaggtgctgatgccgctggcgattcaggttcatcatgccgtttgtgatggcttccatgtcggcagaatgcttaatgaattacaacagtttttatgcatgcgcccaatacgcaaaccgcctctccccgcgcgttggccgattcattaatgcagctggcacgacaggtttcccgactggtggataaccgtattaccgcctttgagtgagctgataccgctcgccgcagccgaacgaccgagcgcagcgagtcagtgagcgaggacacaagctttgacagctagctcagtcctaggtataatactagcgtcgacgtggagatataccatgggtgaactgccgagtaggtagctgataacgagaatattgtggcaaaagcgcataaggtgctgtgaactgccgagtaggtagctgataacggatccgaattcgagcgaaggagatatacatatgtttttgcaaagacctaaaccttacagcgatgaaagtttagaaagtttctttatccgagtggctaacaaaaatggctacggtgatgtccatcgcttcctagaagccactaaacgattccttcaagacattgaccataatggctatcaaacctttccgactgatataactcggataaacccatactcagctaaaaacagttccagcgcacgaactgcgtcattcctgaaacttgcacaattgacatttaatgaaccgccagagctacttgggttggcaattaacagaacaaacatgaaatactcgccgtcaactagcgcggttgttagaggtgcagaagtctttcctcgcagtttactacggacgcactccatcccctgctgtcctttgtgtctgcgagaaaatggctacgcctcctacctttggcactttcaggggtacgaatactgccacagccataacgtacctttaattaccacttgtagctgtggtaaggagtttgactaccgagtatctgggttaaagggcatttgctgcaaatgcaaggagcctatcaccttaaccagcagggagaacggtcatgaggcagcgtgtactgtttcaaactggcttgctggccatgaatctaaacctctgccaaatcttcctaaaagctaccgatggggtttagttcattggtggatgggtattaaagatagcgagttcgatcacttttcgttcgttcaatttttctcaaactggccaaggtcattccactcgataatcgaagatgaagtagagttcaaccttgagcatgctgttgtcagcacgtctgaattacgactaaaagatcttcttggtcgattgtttttcggttcaattcggttacctgagcggaatcttcaacacaatatcatccttggtgagcttctctgctatttagaaaatcgtttatggcaagacaagggattaatcgccaacctcaaaatgaacgcgttagaggcgactgtaatgttaaattgtagcctcgatcagattgcatcaatggttgaacaacgcatcttgaagccaaatcgaaaaagcaagcccaacagccctcttgatgttaccgattatctatttcatttcggcgatattttctgtctttggttagctgagttccaaagcgatgagtttaaccgttcgttttatgtgtcgaggtggtaaatgcaaactctgaaagaactaatcgcatccaatcctgacgacttaacaactgaacttaagagagcatttcgtccactcacaccgcatattgcaattgatggtaatgaacttgacgcactgacgatattagtcaatttaaccgataagactgatgatcagaaagacctgctcgatcgagccaaatgcaagcaaaaacttcgagatgaaaaatggtgggctagctgcataaattgcgttaattacagacaaagccataacccaaaattcccggatatacgttctgaaggcgtgattcgaacccaagccctgggtgaattaccgagtttcctactctcgtcctcaaaaatcccaccataccattggtcatatagccatgattcaaaatacgtcaacaaaagcgcattcctcaccaatgagttttgttgggatggtgagatctcatgtttgggtgagcttcttaaagatgcagatcacccactttggaatactttgaaaaagttaggttgttctcaaaaaacttgcaaagcaatggcaaaacaactagctgatattactctcacgactatcaatgtcacactcgcaccaaattacctgactcaaatatctctccccgatagtgatacatcctacatttcactctctcctgttgcatcgctatcgatgcaaagccactttcatcagaggctccaagatgaaaatcggcatagcgcgataacgcggtttagccgaactaccaacatgggggtcactgcgatgacatgtggcggcgcatttagaatgttaaagtctggcgctaagttttccagcccccctcatcaccgattaaacagtaaacgaagttggttgacgtcagagcatgttcagtcattaaaacagtaccagcgcctcaacaaaagcctcatacctgaaaactctcggattgcactccgtagaaaatacaaaatcgagcttcaaaatatggtcagatcttggtttgcaatgcaagaccatacccttgattcgaacatacttatccaacatttgaatcatgacctatcttacttaggagccacaaaacgttttgcatacgatccagcgatgaccaagctctttactgagcttttgaaacgagagttatcaaattcaatcaataatggtgagcaacacactaatggatcgtttttagtcctaccgaatatcagggtttgtggcgcaacagctttaagctccccggtaacggtggggattccatcacttacagctttctttggcttcgttcacgcatttgaacggaatataaatcgcaccacctcatcgtttcgtgttgaatcctttgcgatatgcgtccatcaactacatgtcgagaagcgaggtttgacagcagagtttgtggaaaaaggcgacgggactatatccgctcccgcgacccgggatgactggcagtgtgatgtcgtatttagccttattttgaacaccaactttgctcaacatattgaccaagatacgttagttacatcactaccaaagcgattggctcggggttcagcaaaaattgcgattgatgactttaaacatatcaactcattctcgacattagaaacagcgatcgaatctctgccaatagaagctggtaggtggttatcactttacgcacagtcaaacaataatctaagtgatctattagcagccatgacagaggaccatcagctcatggcaagctgcgtcggttaccacttgttagaagagcccaaagataaaccaaactccctcagaggttacaaacacgctatcgccgagtgcatcattggactcattaactcaatcacctttagctcagagactgatcccaacacaatcttttggtcgctaaagaactatcaaaactacctagtggtacagccaaggagtatcaacgatgaaactaccgacaaatctagcctatgagcgctctatcgacccatcagatgtctgtttttttgtcgtctggcccgatgatagaaaaacacctttaacctacaattctcgtactctgctcgggcaaatggaagcggcatcattagcctatgatgtctcaggtcaaccaataaaaagtgccaccgctgaggcgttagctcaagggaaccctcatcaagttgatttctgccacgttccatacggtgcgagtcatattgaatgcagtttctccgtctcgttttcttctgaactacgtcaaccatataagtgtaactcaagcaaagttaaacaaacgctagtgcaattagtcgagctctacgaaacgaaaatcggctggactgagctagcaacccgatatttgatgaacatttgcaacggtaaatggctgtggaaaaatacccgtaaagcctattgctggaacattgtacttacaccttggccttggaacggggaaaaggttggatttgaagatattcgtactaactacacctcacggcaagactttaaaaataataaaaattggtctgctatagttgaaatgatcaaaaccgcattttctagtactgatgggctggcgatatttgaagtcagggccaccttgcacttgccaacgaatgctatggtgcggccaagccaagttttcacagaaaaagaaagtggcagtaaaagtaaatctaaaactcaaaacagtcgagtttttcagagtacaactattgatggtgaacgatcgccaatactaggggcctttaaaacgggagcagctattgcaaccattgacgactggtatcctgaagccactgagccactaagggtcggacggtttggggttcatcgcgaagatgtcacttgctaccgtcatccgtctaccggaaaagattttttctcgatattacaacaagcagagcactatattgaagtgttgagcgccaacaaaactcccgctcaagaaactatcaacgacatgcactttttaatggctaacctgattaagggtgggatgttccagcataaaggagactgactgtgaaatggtattataagacaatcacctttctgccagagttgtgcaacaacgagtcactggctgcaaagtgtctccgcgttctgcatggatttaactatcagtatgagacacgaaatatcggcgtttcatttccgctttggtgtgatgcaacggttggaaaaaagatttcatttgtcagcaagaacaagatagaactcgacttactacttaaacaacactatttcgtccaaatggaacaacttcaatactttcatatatccaacactgttctcgtcccagaagattgtacatacgtttcctttagacgctgtcaatctatagataagctcacagcagcagggctggcaaggaaaatcagacgcctggagaaacgtgctctatctagaggcgagcaatttgacccatcatcttttgctcaaaaagagcatactgcaatagcgcactaccactcacttggggagtccagcaaacagacgaaccgcaactttcgactcaatatcaggatgctctcggagcaaccccgtgaggggaactcgatttttagtagctatggcttatcaaattcagaaaactcgtttcagcctgtacccttaatctgacctttaataaggagatataccatggcgacaagtttacctacgccctcagcaattacgacttcggcgttagagtatgcattccatactcccgctcgcaatctaacgaaatctcgcggaaaaaacattcatcgttatgtcagtgtaaagatgagtaagaggattacggtagaatctactctagagtgtgatgcctgctatcactttgattttgagccaagtattgttcgcttttgcgctcaaccgattcgatttttatattatctcaatggtcagtctcactcctatgttcctgactttctagttcaatttgataccaacgagtttgttctatatgaagtaaagtcagcttatgctaagaacaaacctgattttgatgttgaatgggaggcgaaagtaaaagcagcaactgaactagggctagaattggagcttgttgaagagagtgatattagggatacggttgtattaaataatcttaagcgcatgcatcgttatgcttcgaaagatgagctgaataacgtacataactctctcttaaaaataataaagtacaatggcgcccaatctgcaagatgcttgggagaacagttgggtttaaaaggccgaactgttttaccaattttgtgcgatttgctgtcaaggtgtttactcgatacacgtttggataagcctctatctcttgaatctcgatttgagttggccagttatggctaagaaagggttctcaagtttccatagaaaagcagtctcttcccaagatacgcttgaatcgatagagcttgtctctagcgctaattgtctagaaagtgttacgtatcaagatatatcagcatttcccgaaacaattgcggtagagattaatttccgattaagcattcttcgctttttagcgcgaaagtgcgaaaccattgtggccaaatcaattgaaccacatcgtgtagagctacagcaaaactatagtagaaaaatacccagtgcaataacgatatatcgatggtggcttgcttttcgaaaatcagactacaaccccattagcttagcacctaatatcaaggatagaggtaatagagagacaaaagtgtcaacagttgttgattctattatggaacaggcagttgaaagagttatatctggacgaaaagtcaatgttagctctgcatataaacgtgttcgacgaaaagttcgtcaatacaatctaactcatggaacgaaatacacgtatcctaagtacgaatctgtaagaaagcgagtaaaaaagaaaaccccatttgagttattagccgcagggaaaggggagagagtagctaagagagagtttcgccgaatgggaaaaaagatcctcacgtctagcgtgctagagagggttgaaatagatcacactgtcgttgacctttttgcagtacacgaagagtatcgaatcccattgggccgaccttggcttactcaattggttgattgttacagtaaagctgtaatcggtttttatttaggtttcgagcctcctagctatgtgtcggtttcccttgcacttaagaatgcaatacaacgcaaagatgacttaatctcctcgtatgaatcgatcgagaatgaatggctatgttatggcatcccagacctactcgtaactgataatggtaaagagtttttgtcgaaagcatttgatcaagcatgtgaatcactattgatcaatgtgcatcaaaataaagttgagacgcccgacaacaaacctcatgttgaacgtaactacgggactattaatacttctctgttagacgatttacctgggaaatccttcagccagtaccttcaaagagaagggtacgactctgtgggagaagctacccttacactcaatgagattagagaaatttacttaatttggttggtggatatttatcataaaaaacccaatcagagaggcactaattgtcctaatgttgcgtggaaaaagggttgtcaagaatgggaaccagaggagttctctggttctaaagacgaattagactttaaatttgctattgttgattacaaacaacttactaaagtagggataactgtctacaaagaactgagttatagcaatgaccgtttagctgaatatagagggaagaaaggaaaccataaagttcagttcaagtataaccctgagtgtatggcagttatttgggtgttggatgaggatatgaatgagtactttacagttaatgcgattgactacgaatatgcaagtagagtatcactttggcaacataaatataacatgaaatatcaagcagaactaaattcagcagaatatgatgaggacaaggaaattgatgcagaaataaaaattgaagaaatcgcagatcgttcaattgttaagactaacaaaatcagagctcggaggcgtggcgctaggcatcaagagaatagcgcaagggctaagtcaatcagtaatgcgaacccggcctcgatacaaaaacatgaagatgaaatcgttagtgcagataatgacgattgggatattgattatgtctgagaaatcgtcaaatgagtgaaacgcgtgaggctcgtatatcaagagctaaaagggcatttgtatccacaccgagcgttaggaaaatcttgagttacatggatagatgtagagatctatcagacctagagtctgagcctacatgcatgatggtctatggtgcttcgggtgtaggtaaaacgaccgtcatcaagaaatacttaaatcaaaacagaagagagtccgaagccgggggcgatataataccggttttgcatattgagttgccagacaatgcgaagccagtagatgcagcaagggaattgctggttgaaatgggtgacccgctagcactttatgaaactgacttagctagattgacgaaaagactgactgaattaatccctgcggtcggcgtgaagctgattattatcgatgagttccaacatttggtggaagaaaggtcaaatcgggttcttacccaagtaggtaattggctaaaaatgatacttaacaaaacgaaatgtccaattgttatatttggtatgccatactcaaaagttgtactgcaagcaaactcgcaacttcacgggcgattttccattcaggttgaactgcgcccctttagctaccagggaggtagaggtgtatttaaaacttttttggaataccttgataaagccctaccttttgaaaaacaggctggcttagccaacgaaagtttgcagaaaaaattgtatgcattctctcagggaaacatgcgttcgttgagaaaccttatttatcaagcatctatcgaagcaattgataatcagcatgagacgataaccgaagaagatttcgtttttgcatcgaagttgacatcgggcgataaacccaactcatggaaaaatccttttgaggagggtgttgaggtaacagaagatatgttacgaccgccaccaaaagatattggttgggaggactatttgagacattcaaccccgagagtgagtaaaccaggtagaaataaaaactttttcgaataacctaggctgctgcgctgctgccaccgctgagcaataactagcataaccccttggggcctctaaacgggtcttgaggggttttttgctgaaacctcaggcatgttggaacaaccataaaatgataattacacccataaattgataattatcacacccataaattgatattgcctcttcatggtctaaacttcagtaagtttacgacattttcatgaagaggtcatttccggggatccatggagaaaaaaatcactggatataccaccgttgatatatcccaatggcatcgtaaagaacattttgaggcatttcagtcagttgctcaatgtacctataaccagaccgttcagctggatattacggcctttttaaagaccgtaaagaaaaataagcacaagttttatccggcctttattcacattcttgcccgcctgatgaatgctcatccggagttccgtatggcaatgaaagacggtgagctggtgatatgggatagtgttcacccttgttacaccgttttccatgagcaaactgaaacgttttcatcgctctggagtgaataccacgacgatttccggcagtttctacacatatattcgcaagatgtggcgtgttacggtgaaaacctggcctatttccctaaagggtttattgagaatatgtttttcgtctcagccaatccctgggtgagtttcaccagttttgatttaaacgtggccaatatggacaacttcttcgcccccgttttcactatgggcaaatattatacgcaaggcgacaaggtgctgatgccgctggcgattcaggttcatcatgccgtttgtgatggcttccatgtcggcagaatgcttaatgaattacaacagtactgcgatgagtggcagggcggggcgtaatttttttaaggcagttattggtgcccttctagagtccttactgcagtagttttgctgaaatactcgattcacaaaaatatcaacttatggttgttttgtgagatatcaatatatggttgttttgtggttaagttgctgattataaataattattaaatatcactttatggttgcatcaacaggtaccgagctcgaattcactggccgtcgttttacaacgtcgtgactgggaaaaccctggcgttacccaacttaatcgccttgcggccagtttgctcaggctctccccgtggaggtaataattgacgatatgatcatttattctgcctcccagagcctgataaaaacggtgaatccgttagcgaggtgccgccggcttccattcaggtcgaggtggcccggctccatgcaccgcgacgcaacgcggggaggcagacaaggtatagggcggcgaggcggctacagccgatagtctggaacagcgcacttacgggttgctgcgcaacccaagtgctaccggcgcggcagcgtgacccgtgtcggcggctccaacggctcgccatcgtccagaaaacacggctcatcgggcatcggcaggcgctgctgcccgcgccgttcccattcctccgtttcggtcaaggctggcaggtctggttccatgcccggaatgccgggctggctgggcggctcctcgccggggccggtcggtagttgctgctcgcccggatacagggtcgggatgcggcgcaggtcgccatgccccaacagcgattcgtcctggtcgtcgtgatcaaccaccacggcggcactgaacaccgacaggcgcaactggtcgcggggctggccccacgccacgcggtcattgaccacgtaggccgacacggtgccggggccgttgagcttcacgacggagatccagcgctcggccaccaagtccttgactgcgtattggaccgtccgcaaagaacgtccgatgagcttggaaagtgtcttctggctgaccaccacggcgttctggtggcccatctgcgccacgaggtgatgcagcagcattg

SEQ ID NO: 91 - DNA, 14028 bp, artificial sequence
  Synthetic
ccgccgtgggtttcctcgcaataagcccggcccacgcctcatgcgctttgcgttccgtttgcacccagtgaccgggcttgttcttggcttgaatgccgatttctctggactgcgtggccatgcttatctccatgcggtaggggtgccgcacggttgcggcaccatgcgcaatcagctgcaacttttcggcagcgcgacaacaattatgcgttgcgtaaaagtggcagtcaattacagattttctttaacctacgcaatgagctattgcggggggtgccgcaatgagctgttgcgtaccccccttttttaagttgttgatttttaagtctttcgcatttcgccctatatctagttctttggtgcccaaagaagggcacccctgcggggttcccccacgccttcggcgcggctccccctccggcaaaaagtggcccctccggggcttgttgatcgactgcgcggccttcggccttgcccaaggtggcgctgcccccttggaacccccgcactcgccgccgtgaggctcggggggcaggcgggcgggcttcgcccttcgactgcccccactcgcataggcttgggtcgttccaggcgcgtcaaggccaagccgctgcgcggtcgctgcgcgagccttgacccgccttccacttggtgtccaaccggcaagcgaagcgcgcaggccgcaggccggaggcttttccccagagaaaattaaaaaaattgatggggcaaggccgcaggccgcgcagttggagccggtgggtatgtggtcgaaggctgggtagccggtgggcaatccctgtggtcaagctcgtgggcaggcgcagcctgtccatcagcttgtccagcagggttgtccacgggccgagcgaagcgagccagccggtggccgctcgcggccatcgtccacatatccacgggctggcaagggagcgcagcgaccgcgcagggcgaagcccggagagcaagcccgtagggcgccgcagccgccgtaggcggtcacgactttgcgaagcaaagtctagtgagtatactcaagcattgagtggcccgccggaggcaccgccttgcgctgcccccgtcgagccggttggacaccaaaagggaggggcaggcatggcggcatacgcgatcatgcgatgcaagaagctggcgaaaatgggcaacgtggcggccagtctcaagcacgcctaccgcgagcgcgagacgcccaacgctgacgccagcaggacgccagagaacgagcactgggcggccagcagcaccgatgaagcgatgggccgactgcgcgagttgctgccagagaagcggcgcaaggacgctgtgttggcggtcgagtacgtcatgacggccagcccggaatggtggaagtcggccagccaagaacagcaggcggcgttcttcgagaaggcgcacaagtggctggcggacaagtacggggcggatcgcatcgtgacggccagcatccaccgtgacgaaaccagcccgcacatgaccgcgttcgtggtgccgctgacgcaggacggcaggctgtcggccaaggagttcatcggcaacaaagcgcagatgacccgcgaccagaccacgtttgcggccgctgtggccgatctagggctgcaacggggcatcgagggcagcaaggcacgtcacacgcgcattcaggcgttctacgaggccctggagcggccaccagtgggccacgtcaccatcagcccgcaagcggtcgagccacgcgcctatgcaccgcagggattggccgaaaagctgggaatctcaaagcgcgttgagacgccggaagccgtggccgaccggctgacaaaagcggttcggcaggggtatgagcctgccctacaggccgccgcaggagcgcgtgagatgcgcaagaaggccgatcaagcccaagagacggcccgtgaccttcgggagcgcctgaagcccgttctggacgccctggggccgttgaatcgggatatgcaggccaaggccgccgcgatcatcaaggccgtgggcgaaaagctgctgacggaacagcgggaagtccagcgccagaaacaggcccagcgccagcaggaacgcgggcgcgcacatttccccgaaaagtgccacctgggatgaatgtcagctactgggctatctggacaagggaaaacgcaagcgcaaagagaaagcaggtagcttgcagtgggcttacatggcgatagctagactgggcggttttatggacagcaagcgaaccggaattgccagctggggcgccctctggtaaggttgggaagccctgcaaagtaaactggatggctttcttgccgccaaggatctgatggcgcaggggatcaagatctgatcaagagacaggatgaggatcgtttcgcatgattgaacaagatggattgcacgcaggttctccggccgcttgggtggagaggctattcggctatgactgggcacaacagacaatcggctgctctgatgccgccgtgttccggctgtcagcgcaggggcgcccggttctttttgtcaagaccgacctgtccggtgccctgaatgaactgcaagacgaggcagcgcggctatcgtggctggccacgacgggcgttccttgcgcagctgtgctcgacgttgtcactgaagcgggaagggactggctgctattgggcgaagtgccggggcaggatctcctgtcatctcaccttgctcctgccgagaaagtatccatcatggctgatgcaatgcggcggctgcatacgcttgatccggctacctgcccattcgaccaccaagcgaaacatcgcatcgagcgagcacgtactcggatggaagccggtcttgtcgatcaggatgatctggacgaagagcatcaggggctcgcgccagccgaactgttcgccaggctcaaggcgcgcatgcccgacggcgaggatctcgtcgtgacccatggcgatgcctgcttgccgaatatcatggtggaaaatggccgcttttctggattcatcgactgtggccggctgggtgtggcggaccgctatcaggacatagcgttggctacccgtgatattgctgaagagcttggcggcgaatgggctgaccgcttcctcgtgctttacggtatcgccgctcccgattcgcagcgcatcgccttctatcgccttcttgacgagttcttctgagcgggactctggggttcgaaatgaccgaccaagcgacgcccaacctgccatcacgagatttcgattccaccgccgccttctatgaaaggttgggcttcggaatcgttttccgggacgccggctggatgatcctccagcgcggggatctcatgctggagttcttcgcccacccccatgggcaaatattatacgcaaggcgacaaggtgctgatgccgctggcgattcaggttcatcatgccgtttgtgatggcttccatgtcggcagaatgcttaatgaattacaacagtttttatgcatgcgcccaatacgcaaaccgcctctccccgcgcgttggccgattcattaatgcagctggcacgacaggtttcccgactggtggataaccgtattaccgcctttgagtgagctgataccgctcgccgcagccgaacgaccgagcgcagcgagtcagtgagcgaggacacaagctttgacagctagctcagtcctaggtataatactagcgtcgacgtggagatataccatgggtgaactgccgagtaggtagctgataactcttgctgagattgataaggtaattaaccttagtgaactgccgagtaggtagctgataacggatccgaattcgagcgaaggagatatacatatgtttttgcaaagacctaaaccttacagcgatgaaagtttagaaagtttctttatccgagtggctaacaaaaatggctacggtgatgtccatcgcttcctagaagccactaaacgattccttcaagacattgaccataatggctatcaaacctttccgactgatataactcggataaacccatactcagctaaaaacagttccagcgcacgaactgcgtcattcctgaaacttgcacaattgacatttaatgaaccgccagagctacttgggttggcaattaacagaacaaacatgaaatactcgccgtcaactagcgcggttgttagaggtgcagaagtctttcctcgcagtttactacggacgcactccatcccctgctgtcctttgtgtctgcgagaaaatggctacgcctcctacctttggcactttcaggggtacgaatactgccacagccataacgtacctttaattaccacttgtagctgtggtaaggagtttgactaccgagtatctgggttaaagggcatttgctgcaaatgcaaggagcctatcaccttaaccagcagggagaacggtcatgaggcagcgtgtactgtttcaaactggcttgctggccatgaatctaaacctctgccaaatcttcctaaaagctaccgatggggtttagttcattggtggatgggtattaaagatagcgagttcgatcacttttcgttcgttcaatttttctcaaactggccaaggtcattccactcgataatcgaagatgaagtagagttcaaccttgagcatgctgttgtcagcacgtctgaattacgactaaaagatcttcttggtcgattgtttttcggttcaattcggttacctgagcggaatcttcaacacaatatcatccttggtgagcttctctgctatttagaaaatcgtttatggcaagacaagggattaatcgccaacctcaaaatgaacgcgttagaggcgactgtaatgttaaattgtagcctcgatcagattgcatcaatggttgaacaacgcatcttgaagccaaatcgaaaaagcaagcccaacagccctcttgatgttaccgattatctatttcatttcggcgatattttctgtctttggttagctgagttccaaagcgatgagtttaaccgttcgttttatgtgtcgaggtggtaaatgcaaactctgaaagaactaatcgcatccaatcctgacgacttaacaactgaacttaagagagcatttcgtccactcacaccgcatattgcaattgatggtaatgaacttgacgcactgacgatattagtcaatttaaccgataagactgatgatcagaaagacctgctcgatcgagccaaatgcaagcaaaaacttcgagatgaaaaatggtgggctagctgcataaattgcgttaattacagacaaagccataacccaaaattcccggatatacgttctgaaggcgtgattcgaacccaagccctgggtgaattaccgagtttcctactctcgtcctcaaaaatcccaccataccattggtcatatagccatgattcaaaatacgtcaacaaaagcgcattcctcaccaatgagttttgttgggatggtgagatctcatgtttgggtgagcttcttaaagatgcagatcacccactttggaatactttgaaaaagttaggttgttctcaaaaaacttgcaaagcaatggcaaaacaactagctgatattactctcacgactatcaatgtcacactcgcaccaaattacctgactcaaatatctctccccgatagtgatacatcctacatttcactctctcctgttgcatcgctatcgatgcaaagccactttcatcagaggctccaagatgaaaatcggcatagcgcgataacgcggtttagccgaactaccaacatgggggtcactgcgatgacatgtggcggcgcatttagaatgttaaagtctggcgctaagttttccagcccccctcatcaccgattaaacagtaaacgaagttggttgacgtcagagcatgttcagtcattaaaacagtaccagcgcctcaacaaaagcctcatacctgaaaactctcggattgcactccgtagaaaatacaaaatcgagcttcaaaatatggtcagatcttggtttgcaatgcaagaccatacccttgattcgaacatacttatccaacatttgaatcatgacctatcttacttaggagccacaaaacgttttgcatacgatccagcgatgaccaagctctttactgagcttttgaaacgagagttatcaaattcaatcaataatggtgagcaacacactaatggatcgtttttagtcctaccgaatatcagggtttgtggcgcaacagctttaagctccccggtaacggtggggattccatcacttacagctttctttggcttcgttcacgcatttgaacggaatataaatcgcaccacctcatcgtttcgtgttgaatcctttgcgatatgcgtccatcaactacatgtcgagaagcgaggtttgacagcagagtttgtggaaaaaggcgacgggactatatccgctcccgcgacccgggatgactggcagtgtgatgtcgtatttagccttattttgaacaccaactttgctcaacatattgaccaagatacgttagttacatcactaccaaagcgattggctcggggttcagcaaaaattgcgattgatgactttaaacatatcaactcattctcgacattagaaacagcgatcgaatctctgccaatagaagctggtaggtggttatcactttacgcacagtcaaacaataatctaagtgatctattagcagccatgacagaggaccatcagctcatggcaagctgcgtcggttaccacttgttagaagagcccaaagataaaccaaactccctcagaggttacaaacacgctatcgccgagtgcatcattggactcattaactcaatcacctttagctcagagactgatcccaacacaatcttttggtcgctaaagaactatcaaaactacctagtggtacagccaaggagtatcaacgatgaaactaccgacaaatctagcctatgagcgctctatcgacccatcagatgtctgtttttttgtcgtctggcccgatgatagaaaaacacctttaacctacaattctcgtactctgctcgggcaaatggaagcggcatcattagcctatgatgtctcaggtcaaccaataaaaagtgccaccgctgaggcgttagctcaagggaaccctcatcaagttgatttctgccacgttccatacggtgcgagtcatattgaatgcagtttctccgtctcgttttcttctgaactacgtcaaccatataagtgtaactcaagcaaagttaaacaaacgctagtgcaattagtcgagctctacgaaacgaaaatcggctggactgagctagcaacccgatatttgatgaacatttgcaacggtaaatggctgtggaaaaatacccgtaaagcctattgctggaacattgtacttacaccttggccttggaacggggaaaaggttggatttgaagatattcgtactaactacacctcacggcaagactttaaaaataataaaaattggtctgctatagttgaaatgatcaaaaccgcattttctagtactgatgggctggcgatatttgaagtcagggccaccttgcacttgccaacgaatgctatggtgcggccaagccaagttttcacagaaaaagaaagtggcagtaaaagtaaatctaaaactcaaaacagtcgagtttttcagagtacaactattgatggtgaacgatcgccaatactaggggcctttaaaacgggagcagctattgcaaccattgacgactggtatcctgaagccactgagccactaagggtcggacggtttggggttcatcgcgaagatgtcacttgctaccgtcatccgtctaccggaaaagattttttctcgatattacaacaagcagagcactatattgaagtgttgagcgccaacaaaactcccgctcaagaaactatcaacgacatgcactttttaatggctaacctgattaagggtgggatgttccagcataaaggagactgactgtgaaatggtattataagacaatcacctttctgccagagttgtgcaacaacgagtcactggctgcaaagtgtctccgcgttctgcatggatttaactatcagtatgagacacgaaatatcggcgtttcatttccgctttggtgtgatgcaacggttggaaaaaagatttcatttgtcagcaagaacaagatagaactcgacttactacttaaacaacactatttcgtccaaatggaacaacttcaatactttcatatatccaacactgttctcgtcccagaagattgtacatacgtttcctttagacgctgtcaatctatagataagctcacagcagcagggctggcaaggaaaatcagacgcctggagaaacgtgctctatctagaggcgagcaatttgacccatcatcttttgctcaaaaagagcatactgcaatagcgcactaccactcacttggggagtccagcaaacagacgaaccgcaactttcgactcaatatcaggatgctctcggagcaaccccgtgaggggaactcgatttttagtagctatggcttatcaaattcagaaaactcgtttcagcctgtacccttaatctgacctttaataaggagatataccatggcgacaagtttacctacgccctcagcaattacgacttcggcgttagagtatgcattccatactcccgctcgcaatctaacgaaatctcgcggaaaaaacattcatcgttatgtcagtgtaaagatgagtaagaggattacggtagaatctactctagagtgtgatgcctgctatcactttgattttgagccaagtattgttcgcttttgcgctcaaccgattcgatttttatattatctcaatggtcagtctcactcctatgttcctgactttctagttcaatttgataccaacgagtttgttctatatgaagtaaagtcagcttatgctaagaacaaacctgattttgatgttgaatgggaggcgaaagtaaaagcagcaactgaactagggctagaattggagcttgttgaagagagtgatattagggatacggttgtattaaataatcttaagcgcatgcatcgttatgcttcgaaagatgagctgaataacgtacataactctctcttaaaaataataaagtacaatggcgcccaatctgcaagatgcttgggagaacagttgggtttaaaaggccgaactgttttaccaattttgtgcgatttgctgtcaaggtgtttactcgatacacgtttggataagcctctatctcttgaatctcgatttgagttggccagttatggctaagaaagggttctcaagtttccatagaaaagcagtctcttcccaagatacgcttgaatcgatagagcttgtctctagcgctaattgtctagaaagtgttacgtatcaagatatatcagcatttcccgaaacaattgcggtagagattaatttccgattaagcattcttcgctttttagcgcgaaagtgcgaaaccattgtggccaaatcaattgaaccacatcgtgtagagctacagcaaaactatagtagaaaaatacccagtgcaataacgatatatcgatggtggcttgcttttcgaaaatcagactacaaccccattagcttagcacctaatatcaaggatagaggtaatagagagacaaaagtgtcaacagttgttgattctattatggaacaggcagttgaaagagttatatctggacgaaaagtcaatgttagctctgcatataaacgtgttcgacgaaaagttcgtcaatacaatctaactcatggaacgaaatacacgtatcctaagtacgaatctgtaagaaagcgagtaaaaaagaaaaccccatttgagttattagccgcagggaaaggggagagagtagctaagagagagtttcgccgaatgggaaaaaagatcctcacgtctagcgtgctagagagggttgaaatagatcacactgtcgttgacctttttgcagtacacgaagagtatcgaatcccattgggccgaccttggcttactcaattggttgattgttacagtaaagctgtaatcggtttttatttaggtttcgagcctcctagctatgtgtcggtttcccttgcacttaagaatgcaatacaacgcaaagatgacttaatctcctcgtatgaatcgatcgagaatgaatggctatgttatggcatcccagacctactcgtaactgataatggtaaagagtttttgtcgaaagcatttgatcaagcatgtgaatcactattgatcaatgtgcatcaaaataaagttgagacgcccgacaacaaacctcatgttgaacgtaactacgggactattaatacttctctgttagacgatttacctgggaaatccttcagccagtaccttcaaagagaagggtacgactctgtgggagaagctacccttacactcaatgagattagagaaatttacttaatttggttggtggatatttatcataaaaaacccaatcagagaggcactaattgtcctaatgttgcgtggaaaaagggttgtcaagaatgggaaccagaggagttctctggttctaaagacgaattagactttaaatttgctattgttgattacaaacaacttactaaagtagggataactgtctacaaagaactgagttatagcaatgaccgtttagctgaatatagagggaagaaaggaaaccataaagttcagttcaagtataaccctgagtgtatggcagttatttgggtgttggatgaggatatgaatgagtactttacagttaatgcgattgactacgaatatgcaagtagagtatcactttggcaacataaatataacatgaaatatcaagcagaactaaattcagcagaatatgatgaggacaaggaaattgatgcagaaataaaaattgaagaaatcgcagatcgttcaattgttaagactaacaaaatcagagctcggaggcgtggcgctaggcatcaagagaatagcgcaagggctaagtcaatcagtaatgcgaacccggcctcgatacaaaaacatgaagatgaaatcgttagtgcagataatgacgattgggatattgattatgtctgagaaatcgtcaaatgagtgaaacgcgtgaggctcgtatatcaagagctaaaagggcatttgtatccacaccgagcgttaggaaaatcttgagttacatggatagatgtagagatctatcagacctagagtctgagcctacatgcatgatggtctatggtgcttcgggtgtaggtaaaacgaccgtcatcaagaaatacttaaatcaaaacagaagagagtccgaagccgggggcgatataataccggttttgcatattgagttgccagacaatgcgaagccagtagatgcagcaagggaattgctggttgaaatgggtgacccgctagcactttatgaaactgacttagctagattgacgaaaagactgactgaattaatccctgcggtcggcgtgaagctgattattatcgatgagttccaacatttggtggaagaaaggtcaaatcgggttcttacccaagtaggtaattggctaaaaatgatacttaacaaaacgaaatgtccaattgttatatttggtatgccatactcaaaagttgtactgcaagcaaactcgcaacttcacgggcgattttccattcaggttgaactgcgcccctttagctaccagggaggtagaggtgtatttaaaacttttttggaataccttgataaagccctaccttttgaaaaacaggctggcttagccaacgaaagtttgcagaaaaaattgtatgcattctctcagggaaacatgcgttcgttgagaaaccttatttatcaagcatctatcgaagcaattgataatcagcatgagacgataaccgaagaagatttcgtttttgcatcgaagttgacatcgggcgataaacccaactcatggaaaaatccttttgaggagggtgttgaggtaacagaagatatgttacgaccgccaccaaaagatattggttgggaggactatttgagacattcaaccccgagagtgagtaaaccaggtagaaataaaaactttttcgaataacctaggctgctgcgctgctgccaccgctgagcaataactagcataaccccttggggcctctaaacgggtcttgaggggttttttgctgaaacctcaggcatgttggaacaaccataaaatgataattacacccataaattgataattatcacacccataaattgatattgcctcttcatggtctaaacttcagtaagtttacgacattttcatgaagaggtcatttccggggatccatggagaaaaaaatcactggatataccaccgttgatatatcccaatggcatcgtaaagaacattttgaggcatttcagtcagttgctcaatgtacctataaccagaccgttcagctggatattacggcctttttaaagaccgtaaagaaaaataagcacaagttttatccggcctttattcacattcttgcccgcctgatgaatgctcatccggagttccgtatggcaatgaaagacggtgagctggtgatatgggatagtgttcacccttgttacaccgttttccatgagcaaactgaaacgttttcatcgctctggagtgaataccacgacgatttccggcagtttctacacatatattcgcaagatgtggcgtgttacggtgaaaacctggcctatttccctaaagggtttattgagaatatgtttttcgtctcagccaatccctgggtgagtttcaccagttttgatttaaacgtggccaatatggacaacttcttcgcccccgttttcactatgggcaaatattatacgcaaggcgacaaggtgctgatgccgctggcgattcaggttcatcatgccgtttgtgatggcttccatgtcggcagaatgcttaatgaattacaacagtactgcgatgagtggcagggcggggcgtaatttttttaaggcagttattggtgcccttctagagtccttactgcagtagttttgctgaaatactcgattcacaaaaatatcaacttatggttgttttgtgagatatcaatatatggttgttttgtggttaagttgctgattataaataattattaaatatcactttatggttgcatcaacaggtaccgagctcgaattcactggccgtcgttttacaacgtcgtgactgggaaaaccctggcgttacccaacttaatcgccttgcggccagtttgctcaggctctccccgtggaggtaataattgacgatatgatcatttattctgcctcccagagcctgataaaaacggtgaatccgttagcgaggtgccgccggcttccattcaggtcgaggtggcccggctccatgcaccgcgacgcaacgcggggaggcagacaaggtatagggcggcgaggcggctacagccgatagtctggaacagcgcacttacgggttgctgcgcaacccaagtgctaccggcgcggcagcgtgacccgtgtcggcggctccaacggctcgccatcgtccagaaaacacggctcatcgggcatcggcaggcgctgctgcccgcgccgttcccattcctccgtttcggtcaaggctggcaggtctggttccatgcccggaatgccgggctggctgggcggctcctcgccggggccggtcggtagttgctgctcgcccggatacagggtcgggatgcggcgcaggtcgccatgccccaacagcgattcgtcctggtcgtcgtgatcaaccaccacggcggcactgaacaccgacaggcgcaactggtcgcggggctggccccacgccacgcggtcattgaccacgtaggccgacacggtgccggggccgttgagcttcacgacggagatccagcgctcggccaccaagtccttgactgcgtattggaccgtccgcaaagaacgtccgatgagcttggaaagtgtcttctggctgaccaccacggcgttctggtggcccatctgcgccacgaggtgatgcagcagcattg

SEQ ID NO: 92 - DNA, 14028 bp, artificial sequence
  Synthetic
ccgccgtgggtttcctcgcaataagcccggcccacgcctcatgcgctttgcgttccgtttgcacccagtgaccgggcttgttcttggcttgaatgccgatttctctggactgcgtggccatgcttatctccatgcggtaggggtgccgcacggttgcggcaccatgcgcaatcagctgcaacttttcggcagcgcgacaacaattatgcgttgcgtaaaagtggcagtcaattacagattttctttaacctacgcaatgagctattgcggggggtgccgcaatgagctgttgcgtaccccccttttttaagttgttgatttttaagtctttcgcatttcgccctatatctagttctttggtgcccaaagaagggcacccctgcggggttcccccacgccttcggcgcggctccccctccggcaaaaagtggcccctccggggcttgttgatcgactgcgcggccttcggccttgcccaaggtggcgctgcccccttggaacccccgcactcgccgccgtgaggctcggggggcaggcgggcgggcttcgcccttcgactgcccccactcgcataggcttgggtcgttccaggcgcgtcaaggccaagccgctgcgcggtcgctgcgcgagccttgacccgccttccacttggtgtccaaccggcaagcgaagcgcgcaggccgcaggccggaggcttttccccagagaaaattaaaaaaattgatggggcaaggccgcaggccgcgcagttggagccggtgggtatgtggtcgaaggctgggtagccggtgggcaatccctgtggtcaagctcgtgggcaggcgcagcctgtccatcagcttgtccagcagggttgtccacgggccgagcgaagcgagccagccggtggccgctcgcggccatcgtccacatatccacgggctggcaagggagcgcagcgaccgcgcagggcgaagcccggagagcaagcccgtagggcgccgcagccgccgtaggcggtcacgactttgcgaagcaaagtctagtgagtatactcaagcattgagtggcccgccggaggcaccgccttgcgctgcccccgtcgagccggttggacaccaaaagggaggggcaggcatggcggcatacgcgatcatgcgatgcaagaagctggcgaaaatgggcaacgtggcggccagtctcaagcacgcctaccgcgagcgcgagacgcccaacgctgacgccagcaggacgccagagaacgagcactgggcggccagcagcaccgatgaagcgatgggccgactgcgcgagttgctgccagagaagcggcgcaaggacgctgtgttggcggtcgagtacgtcatgacggccagcccggaatggtggaagtcggccagccaagaacagcaggcggcgttcttcgagaaggcgcacaagtggctggcggacaagtacggggcggatcgcatcgtgacggccagcatccaccgtgacgaaaccagcccgcacatgaccgcgttcgtggtgccgctgacgcaggacggcaggctgtcggccaaggagttcatcggcaacaaagcgcagatgacccgcgaccagaccacgtttgcggccgctgtggccgatctagggctgcaacggggcatcgagggcagcaaggcacgtcacacgcgcattcaggcgttctacgaggccctggagcggccaccagtgggccacgtcaccatcagcccgcaagcggtcgagccacgcgcctatgcaccgcagggattggccgaaaagctgggaatctcaaagcgcgttgagacgccggaagccgtggccgaccggctgacaaaagcggttcggcaggggtatgagcctgccctacaggccgccgcaggagcgcgtgagatgcgcaagaaggccgatcaagcccaagagacggcccgtgaccttcgggagcgcctgaagcccgttctggacgccctggggccgttgaatcgggatatgcaggccaaggccgccgcgatcatcaaggccgtgggcgaaaagctgctgacggaacagcgggaagtccagcgccagaaacaggcccagcgccagcaggaacgcgggcgcgcacatttccccgaaaagtgccacctgggatgaatgtcagctactgggctatctggacaagggaaaacgcaagcgcaaagagaaagcaggtagcttgcagtgggcttacatggcgatagctagactgggcggttttatggacagcaagcgaaccggaattgccagctggggcgccctctggtaaggttgggaagccctgcaaagtaaactggatggctttcttgccgccaaggatctgatggcgcaggggatcaagatctgatcaagagacaggatgaggatcgtttcgcatgattgaacaagatggattgcacgcaggttctccggccgcttgggtggagaggctattcggctatgactgggcacaacagacaatcggctgctctgatgccgccgtgttccggctgtcagcgcaggggcgcccggttctttttgtcaagaccgacctgtccggtgccctgaatgaactgcaagacgaggcagcgcggctatcgtggctggccacgacgggcgttccttgcgcagctgtgctcgacgttgtcactgaagcgggaagggactggctgctattgggcgaagtgccggggcaggatctcctgtcatctcaccttgctcctgccgagaaagtatccatcatggctgatgcaatgcggcggctgcatacgcttgatccggctacctgcccattcgaccaccaagcgaaacatcgcatcgagcgagcacgtactcggatggaagccggtcttgtcgatcaggatgatctggacgaagagcatcaggggctcgcgccagccgaactgttcgccaggctcaaggcgcgcatgcccgacggcgaggatctcgtcgtgacccatggcgatgcctgcttgccgaatatcatggtggaaaatggccgcttttctggattcatcgactgtggccggctgggtgtggcggaccgctatcaggacatagcgttggctacccgtgatattgctgaagagcttggcggcgaatgggctgaccgcttcctcgtgctttacggtatcgccgctcccgattcgcagcgcatcgccttctatcgccttcttgacgagttcttctgagcgggactctggggttcgaaatgaccgaccaagcgacgcccaacctgccatcacgagatttcgattccaccgccgccttctatgaaaggttgggcttcggaatcgttttccgggacgccggctggatgatcctccagcgcggggatctcatgctggagttcttcgcccacccccatgggcaaatattatacgcaaggcgacaaggtgctgatgccgctggcgattcaggttcatcatgccgtttgtgatggcttccatgtcggcagaatgcttaatgaattacaacagtttttatgcatgcgcccaatacgcaaaccgcctctccccgcgcgttggccgattcattaatgcagctggcacgacaggtttcccgactggtggataaccgtattaccgcctttgagtgagctgataccgctcgccgcagccgaacgaccgagcgcagcgagtcagtgagcgaggacacaagctttgacagctagctcagtcctaggtataatactagcgtcgacgtggagatataccatgggtgaactgccgagtaggtagctgataacagtacagcgcggctgaaatcatcattaaagcggtgaactgccgagtaggtagctgataacggatccgaattcgagcgaaggagatatacatatgtttttgcaaagacctaaaccttacagcgatgaaagtttagaaagtttctttatccgagtggctaacaaaaatggctacggtgatgtccatcgcttcctagaagccactaaacgattccttcaagacattgaccataatggctatcaaacctttccgactgatataactcggataaacccatactcagctaaaaacagttccagcgcacgaactgcgtcattcctgaaacttgcacaattgacatttaatgaaccgccagagctacttgggttggcaattaacagaacaaacatgaaatactcgccgtcaactagcgcggttgttagaggtgcagaagtctttcctcgcagtttactacggacgcactccatcccctgctgtcctttgtgtctgcgagaaaatggctacgcctcctacctttggcactttcaggggtacgaatactgccacagccataacgtacctttaattaccacttgtagctgtggtaaggagtttgactaccgagtatctgggttaaagggcatttgctgcaaatgcaaggagcctatcaccttaaccagcagggagaacggtcatgaggcagcgtgtactgtttcaaactggcttgctggccatgaatctaaacctctgccaaatcttcctaaaagctaccgatggggtttagttcattggtggatgggtattaaagatagcgagttcgatcacttttcgttcgttcaatttttctcaaactggccaaggtcattccactcgataatcgaagatgaagtagagttcaaccttgagcatgctgttgtcagcacgtctgaattacgactaaaagatcttcttggtcgattgtttttcggttcaattcggttacctgagcggaatcttcaacacaatatcatccttggtgagcttctctgctatttagaaaatcgtttatggcaagacaagggattaatcgccaacctcaaaatgaacgcgttagaggcgactgtaatgttaaattgtagcctcgatcagattgcatcaatggttgaacaacgcatcttgaagccaaatcgaaaaagcaagcccaacagccctcttgatgttaccgattatctatttcatttcggcgatattttctgtctttggttagctgagttccaaagcgatgagtttaaccgttcgttttatgtgtcgaggtggtaaatgcaaactctgaaagaactaatcgcatccaatcctgacgacttaacaactgaacttaagagagcatttcgtccactcacaccgcatattgcaattgatggtaatgaacttgacgcactgacgatattagtcaatttaaccgataagactgatgatcagaaagacctgctcgatcgagccaaatgcaagcaaaaacttcgagatgaaaaatggtgggctagctgcataaattgcgttaattacagacaaagccataacccaaaattcccggatatacgttctgaaggcgtgattcgaacccaagccctgggtgaattaccgagtttcctactctcgtcctcaaaaatcccaccataccattggtcatatagccatgattcaaaatacgtcaacaaaagcgcattcctcaccaatgagttttgttgggatggtgagatctcatgtttgggtgagcttcttaaagatgcagatcacccactttggaatactttgaaaaagttaggttgttctcaaaaaacttgcaaagcaatggcaaaacaactagctgatattactctcacgactatcaatgtcacactcgcaccaaattacctgactcaaatatctctccccgatagtgatacatcctacatttcactctctcctgttgcatcgctatcgatgcaaagccactttcatcagaggctccaagatgaaaatcggcatagcgcgataacgcggtttagccgaactaccaacatgggggtcactgcgatgacatgtggcggcgcatttagaatgttaaagtctggcgctaagttttccagcccccctcatcaccgattaaacagtaaacgaagttggttgacgtcagagcatgttcagtcattaaaacagtaccagcgcctcaacaaaagcctcatacctgaaaactctcggattgcactccgtagaaaatacaaaatcgagcttcaaaatatggtcagatcttggtttgcaatgcaagaccatacccttgattcgaacatacttatccaacatttgaatcatgacctatcttacttaggagccacaaaacgttttgcatacgatccagcgatgaccaagctctttactgagcttttgaaacgagagttatcaaattcaatcaataatggtgagcaacacactaatggatcgtttttagtcctaccgaatatcagggtttgtggcgcaacagctttaagctccccggtaacggtggggattccatcacttacagctttctttggcttcgttcacgcatttgaacggaatataaatcgcaccacctcatcgtttcgtgttgaatcctttgcgatatgcgtccatcaactacatgtcgagaagcgaggtttgacagcagagtttgtggaaaaaggcgacgggactatatccgctcccgcgacccgggatgactggcagtgtgatgtcgtatttagccttattttgaacaccaactttgctcaacatattgaccaagatacgttagttacatcactaccaaagcgattggctcggggttcagcaaaaattgcgattgatgactttaaacatatcaactcattctcgacattagaaacagcgatcgaatctctgccaatagaagctggtaggtggttatcactttacgcacagtcaaacaataatctaagtgatctattagcagccatgacagaggaccatcagctcatggcaagctgcgtcggttaccacttgttagaagagcccaaagataaaccaaactccctcagaggttacaaacacgctatcgccgagtgcatcattggactcattaactcaatcacctttagctcagagactgatcccaacacaatcttttggtcgctaaagaactatcaaaactacctagtggtacagccaaggagtatcaacgatgaaactaccgacaaatctagcctatgagcgctctatcgacccatcagatgtctgtttttttgtcgtctggcccgatgatagaaaaacacctttaacctacaattctcgtactctgctcgggcaaatggaagcggcatcattagcctatgatgtctcaggtcaaccaataaaaagtgccaccgctgaggcgttagctcaagggaaccctcatcaagttgatttctgccacgttccatacggtgcgagtcatattgaatgcagtttctccgtctcgttttcttctgaactacgtcaaccatataagtgtaactcaagcaaagttaaacaaacgctagtgcaattagtcgagctctacgaaacgaaaatcggctggactgagctagcaacccgatatttgatgaacatttgcaacggtaaatggctgtggaaaaatacccgtaaagcctattgctggaacattgtacttacaccttggccttggaacggggaaaaggttggatttgaagatattcgtactaactacacctcacggcaagactttaaaaataataaaaattggtctgctatagttgaaatgatcaaaaccgcattttctagtactgatgggctggcgatatttgaagtcagggccaccttgcacttgccaacgaatgctatggtgcggccaagccaagttttcacagaaaaagaaagtggcagtaaaagtaaatctaaaactcaaaacagtcgagtttttcagagtacaactattgatggtgaacgatcgccaatactaggggcctttaaaacgggagcagctattgcaaccattgacgactggtatcctgaagccactgagccactaagggtcggacggtttggggttcatcgcgaagatgtcacttgctaccgtcatccgtctaccggaaaagattttttctcgatattacaacaagcagagcactatattgaagtgttgagcgccaacaaaactcccgctcaagaaactatcaacgacatgcactttttaatggctaacctgattaagggtgggatgttccagcataaaggagactgactgtgaaatggtattataagacaatcacctttctgccagagttgtgcaacaacgagtcactggctgcaaagtgtctccgcgttctgcatggatttaactatcagtatgagacacgaaatatcggcgtttcatttccgctttggtgtgatgcaacggttggaaaaaagatttcatttgtcagcaagaacaagatagaactcgacttactacttaaacaacactatttcgtccaaatggaacaacttcaatactttcatatatccaacactgttctcgtcccagaagattgtacatacgtttcctttagacgctgtcaatctatagataagctcacagcagcagggctggcaaggaaaatcagacgcctggagaaacgtgctctatctagaggcgagcaatttgacccatcatcttttgctcaaaaagagcatactgcaatagcgcactaccactcacttggggagtccagcaaacagacgaaccgcaactttcgactcaatatcaggatgctctcggagcaaccccgtgaggggaactcgatttttagtagctatggcttatcaaattcagaaaactcgtttcagcctgtacccttaatctgacctttaataaggagatataccatggcgacaagtttacctacgccctcagcaattacgacttcggcgttagagtatgcattccatactcccgctcgcaatctaacgaaatctcgcggaaaaaacattcatcgttatgtcagtgtaaagatgagtaagaggattacggtagaatctactctagagtgtgatgcctgctatcactttgattttgagccaagtattgttcgcttttgcgctcaaccgattcgatttttatattatctcaatggtcagtctcactcctatgttcctgactttctagttcaatttgataccaacgagtttgttctatatgaagtaaagtcagcttatgctaagaacaaacctgattttgatgttgaatgggaggcgaaagtaaaagcagcaactgaactagggctagaattggagcttgttgaagagagtgatattagggatacggttgtattaaataatcttaagcgcatgcatcgttatgcttcgaaagatgagctgaataacgtacataactctctcttaaaaataataaagtacaatggcgcccaatctgcaagatgcttgggagaacagttgggtttaaaaggccgaactgttttaccaattttgtgcgatttgctgtcaaggtgtttactcgatacacgtttggataagcctctatctcttgaatctcgatttgagttggccagttatggctaagaaagggttctcaagtttccatagaaaagcagtctcttcccaagatacgcttgaatcgatagagcttgtctctagcgctaattgtctagaaagtgttacgtatcaagatatatcagcatttcccgaaacaattgcggtagagattaatttccgattaagcattcttcgctttttagcgcgaaagtgcgaaaccattgtggccaaatcaattgaaccacatcgtgtagagctacagcaaaactatagtagaaaaatacccagtgcaataacgatatatcgatggtggcttgcttttcgaaaatcagactacaaccccattagcttagcacctaatatcaaggatagaggtaatagagagacaaaagtgtcaacagttgttgattctattatggaacaggcagttgaaagagttatatctggacgaaaagtcaatgttagctctgcatataaacgtgttcgacgaaaagttcgtcaatacaatctaactcatggaacgaaatacacgtatcctaagtacgaatctgtaagaaagcgagtaaaaaagaaaaccccatttgagttattagccgcagggaaaggggagagagtagctaagagagagtttcgccgaatgggaaaaaagatcctcacgtctagcgtgctagagagggttgaaatagatcacactgtcgttgacctttttgcagtacacgaagagtatcgaatcccattgggccgaccttggcttactcaattggttgattgttacagtaaagctgtaatcggtttttatttaggtttcgagcctcctagctatgtgtcggtttcccttgcacttaagaatgcaatacaacgcaaagatgacttaatctcctcgtatgaatcgatcgagaatgaatggctatgttatggcatcccagacctactcgtaactgataatggtaaagagtttttgtcgaaagcatttgatcaagcatgtgaatcactattgatcaatgtgcatcaaaataaagttgagacgcccgacaacaaacctcatgttgaacgtaactacgggactattaatacttctctgttagacgatttacctgggaaatccttcagccagtaccttcaaagagaagggtacgactctgtgggagaagctacccttacactcaatgagattagagaaatttacttaatttggttggtggatatttatcataaaaaacccaatcagagaggcactaattgtcctaatgttgcgtggaaaaagggttgtcaagaatgggaaccagaggagttctctggttctaaagacgaattagactttaaatttgctattgttgattacaaacaacttactaaagtagggataactgtctacaaagaactgagttatagcaatgaccgtttagctgaatatagagggaagaaaggaaaccataaagttcagttcaagtataaccctgagtgtatggcagttatttgggtgttggatgaggatatgaatgagtactttacagttaatgcgattgactacgaatatgcaagtagagtatcactttggcaacataaatataacatgaaatatcaagcagaactaaattcagcagaatatgatgaggacaaggaaattgatgcagaaataaaaattgaagaaatcgcagatcgttcaattgttaagactaacaaaatcagagctcggaggcgtggcgctaggcatcaagagaatagcgcaagggctaagtcaatcagtaatgcgaacccggcctcgatacaaaaacatgaagatgaaatcgttagtgcagataatgacgattgggatattgattatgtctgagaaatcgtcaaatgagtgaaacgcgtgaggctcgtatatcaagagctaaaagggcatttgtatccacaccgagcgttaggaaaatcttgagttacatggatagatgtagagatctatcagacctagagtctgagcctacatgcatgatggtctatggtgcttcgggtgtaggtaaaacgaccgtcatcaagaaatacttaaatcaaaacagaagagagtccgaagccgggggcgatataataccggttttgcatattgagttgccagacaatgcgaagccagtagatgcagcaagggaattgctggttgaaatgggtgacccgctagcactttatgaaactgacttagctagattgacgaaaagactgactgaattaatccctgcggtcggcgtgaagctgattattatcgatgagttccaacatttggtggaagaaaggtcaaatcgggttcttacccaagtaggtaattggctaaaaatgatacttaacaaaacgaaatgtccaattgttatatttggtatgccatactcaaaagttgtactgcaagcaaactcgcaacttcacgggcgattttccattcaggttgaactgcgcccctttagctaccagggaggtagaggtgtatttaaaacttttttggaataccttgataaagccctaccttttgaaaaacaggctggcttagccaacgaaagtttgcagaaaaaattgtatgcattctctcagggaaacatgcgttcgttgagaaaccttatttatcaagcatctatcgaagcaattgataatcagcatgagacgataaccgaagaagatttcgtttttgcatcgaagttgacatcgggcgataaacccaactcatggaaaaatccttttgaggagggtgttgaggtaacagaagatatgttacgaccgccaccaaaagatattggttgggaggactatttgagacattcaaccccgagagtgagtaaaccaggtagaaataaaaactttttcgaataacctaggctgctgcgctgctgccaccgctgagcaataactagcataaccccttggggcctctaaacgggtcttgaggggttttttgctgaaacctcaggcatgttggaacaaccataaaatgataattacacccataaattgataattatcacacccataaattgatattgcctcttcatggtctaaacttcagtaagtttacgacattttcatgaagaggtcatttccggggatccatggagaaaaaaatcactggatataccaccgttgatatatcccaatggcatcgtaaagaacattttgaggcatttcagtcagttgctcaatgtacctataaccagaccgttcagctggatattacggcctttttaaagaccgtaaagaaaaataagcacaagttttatccggcctttattcacattcttgcccgcctgatgaatgctcatccggagttccgtatggcaatgaaagacggtgagctggtgatatgggatagtgttcacccttgttacaccgttttccatgagcaaactgaaacgttttcatcgctctggagtgaataccacgacgatttccggcagtttctacacatatattcgcaagatgtggcgtgttacggtgaaaacctggcctatttccctaaagggtttattgagaatatgtttttcgtctcagccaatccctgggtgagtttcaccagttttgatttaaacgtggccaatatggacaacttcttcgcccccgttttcactatgggcaaatattatacgcaaggcgacaaggtgctgatgccgctggcgattcaggttcatcatgccgtttgtgatggcttccatgtcggcagaatgcttaatgaattacaacagtactgcgatgagtggcagggcggggcgtaatttttttaaggcagttattggtgcccttctagagtccttactgcagtagttttgctgaaatactcgattcacaaaaatatcaacttatggttgttttgtgagatatcaatatatggttgttttgtggttaagttgctgattataaataattattaaatatcactttatggttgcatcaacaggtaccgagctcgaattcactggccgtcgttttacaacgtcgtgactgggaaaaccctggcgttacccaacttaatcgccttgcggccagtttgctcaggctctccccgtggaggtaataattgacgatatgatcatttattctgcctcccagagcctgataaaaacggtgaatccgttagcgaggtgccgccggcttccattcaggtcgaggtggcccggctccatgcaccgcgacgcaacgcggggaggcagacaaggtatagggcggcgaggcggctacagccgatagtctggaacagcgcacttacgggttgctgcgcaacccaagtgctaccggcgcggcagcgtgacccgtgtcggcggctccaacggctcgccatcgtccagaaaacacggctcatcgggcatcggcaggcgctgctgcccgcgccgttcccattcctccgtttcggtcaaggctggcaggtctggttccatgcccggaatgccgggctggctgggcggctcctcgccggggccggtcggtagttgctgctcgcccggatacagggtcgggatgcggcgcaggtcgccatgccccaacagcgattcgtcctggtcgtcgtgatcaaccaccacggcggcactgaacaccgacaggcgcaactggtcgcggggctggccccacgccacgcggtcattgaccacgtaggccgacacggtgccggggccgttgagcttcacgacggagatccagcgctcggccaccaagtccttgactgcgtattggaccgtccgcaaagaacgtccgatgagcttggaaagtgtcttctggctgaccaccacggcgttctggtggcccatctgcgccacgaggtgatgcagcagcattg

SEQ ID NO: 93 - DNA, 14028 bp, artificial sequence
  Synthetic
ccgccgtgggtttcctcgcaataagcccggcccacgcctcatgcgctttgcgttccgtttgcacccagtgaccgggcttgttcttggcttgaatgccgatttctctggactgcgtggccatgcttatctccatgcggtaggggtgccgcacggttgcggcaccatgcgcaatcagctgcaacttttcggcagcgcgacaacaattatgcgttgcgtaaaagtggcagtcaattacagattttctttaacctacgcaatgagctattgcggggggtgccgcaatgagctgttgcgtaccccccttttttaagttgttgatttttaagtctttcgcatttcgccctatatctagttctttggtgcccaaagaagggcacccctgcggggttcccccacgccttcggcgcggctccccctccggcaaaaagtggcccctccggggcttgttgatcgactgcgcggccttcggccttgcccaaggtggcgctgcccccttggaacccccgcactcgccgccgtgaggctcggggggcaggcgggcgggcttcgcccttcgactgcccccactcgcataggcttgggtcgttccaggcgcgtcaaggccaagccgctgcgcggtcgctgcgcgagccttgacccgccttccacttggtgtccaaccggcaagcgaagcgcgcaggccgcaggccggaggcttttccccagagaaaattaaaaaaattgatggggcaaggccgcaggccgcgcagttggagccggtgggtatgtggtcgaaggctgggtagccggtgggcaatccctgtggtcaagctcgtgggcaggcgcagcctgtccatcagcttgtccagcagggttgtccacgggccgagcgaagcgagccagccggtggccgctcgcggccatcgtccacatatccacgggctggcaagggagcgcagcgaccgcgcagggcgaagcccggagagcaagcccgtagggcgccgcagccgccgtaggcggtcacgactttgcgaagcaaagtctagtgagtatactcaagcattgagtggcccgccggaggcaccgccttgcgctgcccccgtcgagccggttggacaccaaaagggaggggcaggcatggcggcatacgcgatcatgcgatgcaagaagctggcgaaaatgggcaacgtggcggccagtctcaagcacgcctaccgcgagcgcgagacgcccaacgctgacgccagcaggacgccagagaacgagcactgggcggccagcagcaccgatgaagcgatgggccgactgcgcgagttgctgccagagaagcggcgcaaggacgctgtgttggcggtcgagtacgtcatgacggccagcccggaatggtggaagtcggccagccaagaacagcaggcggcgttcttcgagaaggcgcacaagtggctggcggacaagtacggggcggatcgcatcgtgacggccagcatccaccgtgacgaaaccagcccgcacatgaccgcgttcgtggtgccgctgacgcaggacggcaggctgtcggccaaggagttcatcggcaacaaagcgcagatgacccgcgaccagaccacgtttgcggccgctgtggccgatctagggctgcaacggggcatcgagggcagcaaggcacgtcacacgcgcattcaggcgttctacgaggccctggagcggccaccagtgggccacgtcaccatcagcccgcaagcggtcgagccacgcgcctatgcaccgcagggattggccgaaaagctgggaatctcaaagcgcgttgagacgccggaagccgtggccgaccggctgacaaaagcggttcggcaggggtatgagcctgccctacaggccgccgcaggagcgcgtgagatgcgcaagaaggccgatcaagcccaagagacggcccgtgaccttcgggagcgcctgaagcccgttctggacgccctggggccgttgaatcgggatatgcaggccaaggccgccgcgatcatcaaggccgtgggcgaaaagctgctgacggaacagcgggaagtccagcgccagaaacaggcccagcgccagcaggaacgcgggcgcgcacatttccccgaaaagtgccacctgggatgaatgtcagctactgggctatctggacaagggaaaacgcaagcgcaaagagaaagcaggtagcttgcagtgggcttacatggcgatagctagactgggcggttttatggacagcaagcgaaccggaattgccagctggggcgccctctggtaaggttgggaagccctgcaaagtaaactggatggctttcttgccgccaaggatctgatggcgcaggggatcaagatctgatcaagagacaggatgaggatcgtttcgcatgattgaacaagatggattgcacgcaggttctccggccgcttgggtggagaggctattcggctatgactgggcacaacagacaatcggctgctctgatgccgccgtgttccggctgtcagcgcaggggcgcccggttctttttgtcaagaccgacctgtccggtgccctgaatgaactgcaagacgaggcagcgcggctatcgtggctggccacgacgggcgttccttgcgcagctgtgctcgacgttgtcactgaagcgggaagggactggctgctattgggcgaagtgccggggcaggatctcctgtcatctcaccttgctcctgccgagaaagtatccatcatggctgatgcaatgcggcggctgcatacgcttgatccggctacctgcccattcgaccaccaagcgaaacatcgcatcgagcgagcacgtactcggatggaagccggtcttgtcgatcaggatgatctggacgaagagcatcaggggctcgcgccagccgaactgttcgccaggctcaaggcgcgcatgcccgacggcgaggatctcgtcgtgacccatggcgatgcctgcttgccgaatatcatggtggaaaatggccgcttttctggattcatcgactgtggccggctgggtgtggcggaccgctatcaggacatagcgttggctacccgtgatattgctgaagagcttggcggcgaatgggctgaccgcttcctcgtgctttacggtatcgccgctcccgattcgcagcgcatcgccttctatcgccttcttgacgagttcttctgagcgggactctggggttcgaaatgaccgaccaagcgacgcccaacctgccatcacgagatttcgattccaccgccgccttctatgaaaggttgggcttcggaatcgttttccgggacgccggctggatgatcctccagcgcggggatctcatgctggagttcttcgcccacccccatgggcaaatattatacgcaaggcgacaaggtgctgatgccgctggcgattcaggttcatcatgccgtttgtgatggcttccatgtcggcagaatgcttaatgaattacaacagtttttatgcatgcgcccaatacgcaaaccgcctctccccgcgcgttggccgattcattaatgcagctggcacgacaggtttcccgactggtggataaccgtattaccgcctttgagtgagctgataccgctcgccgcagccgaacgaccgagcgcagcgagtcagtgagcgaggacacaagcttttacagctagctcagtcctaggtattatgctagcgtcgacgtggagatataccatgggtgaactgccgagtaggtagctgataacagtacagcgcggctgaaatcatcattaaagcggtgaactgccgagtaggtagctgataacggatccgaattcgagcgaaggagatatacatatgtttttgcaaagacctaaaccttacagcgatgaaagtttagaaagtttctttatccgagtggctaacaaaaatggctacggtgatgtccatcgcttcctagaagccactaaacgattccttcaagacattgaccataatggctatcaaacctttccgactgatataactcggataaacccatactcagctaaaaacagttccagcgcacgaactgcgtcattcctgaaacttgcacaattgacatttaatgaaccgccagagctacttgggttggcaattaacagaacaaacatgaaatactcgccgtcaactagcgcggttgttagaggtgcagaagtctttcctcgcagtttactacggacgcactccatcccctgctgtcctttgtgtctgcgagaaaatggctacgcctcctacctttggcactttcaggggtacgaatactgccacagccataacgtacctttaattaccacttgtagctgtggtaaggagtttgactaccgagtatctgggttaaagggcatttgctgcaaatgcaaggagcctatcaccttaaccagcagggagaacggtcatgaggcagcgtgtactgtttcaaactggcttgctggccatgaatctaaacctctgccaaatcttcctaaaagctaccgatggggtttagttcattggtggatgggtattaaagatagcgagttcgatcacttttcgttcgttcaatttttctcaaactggccaaggtcattccactcgataatcgaagatgaagtagagttcaaccttgagcatgctgttgtcagcacgtctgaattacgactaaaagatcttcttggtcgattgtttttcggttcaattcggttacctgagcggaatcttcaacacaatatcatccttggtgagcttctctgctatttagaaaatcgtttatggcaagacaagggattaatcgccaacctcaaaatgaacgcgttagaggcgactgtaatgttaaattgtagcctcgatcagattgcatcaatggttgaacaacgcatcttgaagccaaatcgaaaaagcaagcccaacagccctcttgatgttaccgattatctatttcatttcggcgatattttctgtctttggttagctgagttccaaagcgatgagtttaaccgttcgttttatgtgtcgaggtggtaaatgcaaactctgaaagaactaatcgcatccaatcctgacgacttaacaactgaacttaagagagcatttcgtccactcacaccgcatattgcaattgatggtaatgaacttgacgcactgacgatattagtcaatttaaccgataagactgatgatcagaaagacctgctcgatcgagccaaatgcaagcaaaaacttcgagatgaaaaatggtgggctagctgcataaattgcgttaattacagacaaagccataacccaaaattcccggatatacgttctgaaggcgtgattcgaacccaagccctgggtgaattaccgagtttcctactctcgtcctcaaaaatcccaccataccattggtcatatagccatgattcaaaatacgtcaacaaaagcgcattcctcaccaatgagttttgttgggatggtgagatctcatgtttgggtgagcttcttaaagatgcagatcacccactttggaatactttgaaaaagttaggttgttctcaaaaaacttgcaaagcaatggcaaaacaactagctgatattactctcacgactatcaatgtcacactcgcaccaaattacctgactcaaatatctctccccgatagtgatacatcctacatttcactctctcctgttgcatcgctatcgatgcaaagccactttcatcagaggctccaagatgaaaatcggcatagcgcgataacgcggtttagccgaactaccaacatgggggtcactgcgatgacatgtggcggcgcatttagaatgttaaagtctggcgctaagttttccagcccccctcatcaccgattaaacagtaaacgaagttggttgacgtcagagcatgttcagtcattaaaacagtaccagcgcctcaacaaaagcctcatacctgaaaactctcggattgcactccgtagaaaatacaaaatcgagcttcaaaatatggtcagatcttggtttgcaatgcaagaccatacccttgattcgaacatacttatccaacatttgaatcatgacctatcttacttaggagccacaaaacgttttgcatacgatccagcgatgaccaagctctttactgagcttttgaaacgagagttatcaaattcaatcaataatggtgagcaacacactaatggatcgtttttagtcctaccgaatatcagggtttgtggcgcaacagctttaagctccccggtaacggtggggattccatcacttacagctttctttggcttcgttcacgcatttgaacggaatataaatcgcaccacctcatcgtttcgtgttgaatcctttgcgatatgcgtccatcaactacatgtcgagaagcgaggtttgacagcagagtttgtggaaaaaggcgacgggactatatccgctcccgcgacccgggatgactggcagtgtgatgtcgtatttagccttattttgaacaccaactttgctcaacatattgaccaagatacgttagttacatcactaccaaagcgattggctcggggttcagcaaaaattgcgattgatgactttaaacatatcaactcattctcgacattagaaacagcgatcgaatctctgccaatagaagctggtaggtggttatcactttacgcacagtcaaacaataatctaagtgatctattagcagccatgacagaggaccatcagctcatggcaagctgcgtcggttaccacttgttagaagagcccaaagataaaccaaactccctcagaggttacaaacacgctatcgccgagtgcatcattggactcattaactcaatcacctttagctcagagactgatcccaacacaatcttttggtcgctaaagaactatcaaaactacctagtggtacagccaaggagtatcaacgatgaaactaccgacaaatctagcctatgagcgctctatcgacccatcagatgtctgtttttttgtcgtctggcccgatgatagaaaaacacctttaacctacaattctcgtactctgctcgggcaaatggaagcggcatcattagcctatgatgtctcaggtcaaccaataaaaagtgccaccgctgaggcgttagctcaagggaaccctcatcaagttgatttctgccacgttccatacggtgcgagtcatattgaatgcagtttctccgtctcgttttcttctgaactacgtcaaccatataagtgtaactcaagcaaagttaaacaaacgctagtgcaattagtcgagctctacgaaacgaaaatcggctggactgagctagcaacccgatatttgatgaacatttgcaacggtaaatggctgtggaaaaatacccgtaaagcctattgctggaacattgtacttacaccttggccttggaacggggaaaaggttggatttgaagatattcgtactaactacacctcacggcaagactttaaaaataataaaaattggtctgctatagttgaaatgatcaaaaccgcattttctagtactgatgggctggcgatatttgaagtcagggccaccttgcacttgccaacgaatgctatggtgcggccaagccaagttttcacagaaaaagaaagtggcagtaaaagtaaatctaaaactcaaaacagtcgagtttttcagagtacaactattgatggtgaacgatcgccaatactaggggcctttaaaacgggagcagctattgcaaccattgacgactggtatcctgaagccactgagccactaagggtcggacggtttggggttcatcgcgaagatgtcacttgctaccgtcatccgtctaccggaaaagattttttctcgatattacaacaagcagagcactatattgaagtgttgagcgccaacaaaactcccgctcaagaaactatcaacgacatgcactttttaatggctaacctgattaagggtgggatgttccagcataaaggagactgactgtgaaatggtattataagacaatcacctttctgccagagttgtgcaacaacgagtcactggctgcaaagtgtctccgcgttctgcatggatttaactatcagtatgagacacgaaatatcggcgtttcatttccgctttggtgtgatgcaacggttggaaaaaagatttcatttgtcagcaagaacaagatagaactcgacttactacttaaacaacactatttcgtccaaatggaacaacttcaatactttcatatatccaacactgttctcgtcccagaagattgtacatacgtttcctttagacgctgtcaatctatagataagctcacagcagcagggctggcaaggaaaatcagacgcctggagaaacgtgctctatctagaggcgagcaatttgacccatcatcttttgctcaaaaagagcatactgcaatagcgcactaccactcacttggggagtccagcaaacagacgaaccgcaactttcgactcaatatcaggatgctctcggagcaaccccgtgaggggaactcgatttttagtagctatggcttatcaaattcagaaaactcgtttcagcctgtacccttaatctgacctttaataaggagatataccatggcgacaagtttacctacgccctcagcaattacgacttcggcgttagagtatgcattccatactcccgctcgcaatctaacgaaatctcgcggaaaaaacattcatcgttatgtcagtgtaaagatgagtaagaggattacggtagaatctactctagagtgtgatgcctgctatcactttgattttgagccaagtattgttcgcttttgcgctcaaccgattcgatttttatattatctcaatggtcagtctcactcctatgttcctgactttctagttcaatttgataccaacgagtttgttctatatgaagtaaagtcagcttatgctaagaacaaacctgattttgatgttgaatgggaggcgaaagtaaaagcagcaactgaactagggctagaattggagcttgttgaagagagtgatattagggatacggttgtattaaataatcttaagcgcatgcatcgttatgcttcgaaagatgagctgaataacgtacataactctctcttaaaaataataaagtacaatggcgcccaatctgcaagatgcttgggagaacagttgggtttaaaaggccgaactgttttaccaattttgtgcgatttgctgtcaaggtgtttactcgatacacgtttggataagcctctatctcttgaatctcgatttgagttggccagttatggctaagaaagggttctcaagtttccatagaaaagcagtctcttcccaagatacgcttgaatcgatagagcttgtctctagcgctaattgtctagaaagtgttacgtatcaagatatatcagcatttcccgaaacaattgcggtagagattaatttccgattaagcattcttcgctttttagcgcgaaagtgcgaaaccattgtggccaaatcaattgaaccacatcgtgtagagctacagcaaaactatagtagaaaaatacccagtgcaataacgatatatcgatggtggcttgcttttcgaaaatcagactacaaccccattagcttagcacctaatatcaaggatagaggtaatagagagacaaaagtgtcaacagttgttgattctattatggaacaggcagttgaaagagttatatctggacgaaaagtcaatgttagctctgcatataaacgtgttcgacgaaaagttcgtcaatacaatctaactcatggaacgaaatacacgtatcctaagtacgaatctgtaagaaagcgagtaaaaaagaaaaccccatttgagttattagccgcagggaaaggggagagagtagctaagagagagtttcgccgaatgggaaaaaagatcctcacgtctagcgtgctagagagggttgaaatagatcacactgtcgttgacctttttgcagtacacgaagagtatcgaatcccattgggccgaccttggcttactcaattggttgattgttacagtaaagctgtaatcggtttttatttaggtttcgagcctcctagctatgtgtcggtttcccttgcacttaagaatgcaatacaacgcaaagatgacttaatctcctcgtatgaatcgatcgagaatgaatggctatgttatggcatcccagacctactcgtaactgataatggtaaagagtttttgtcgaaagcatttgatcaagcatgtgaatcactattgatcaatgtgcatcaaaataaagttgagacgcccgacaacaaacctcatgttgaacgtaactacgggactattaatacttctctgttagacgatttacctgggaaatccttcagccagtaccttcaaagagaagggtacgactctgtgggagaagctacccttacactcaatgagattagagaaatttacttaatttggttggtggatatttatcataaaaaacccaatcagagaggcactaattgtcctaatgttgcgtggaaaaagggttgtcaagaatgggaaccagaggagttctctggttctaaagacgaattagactttaaatttgctattgttgattacaaacaacttactaaagtagggataactgtctacaaagaactgagttatagcaatgaccgtttagctgaatatagagggaagaaaggaaaccataaagttcagttcaagtataaccctgagtgtatggcagttatttgggtgttggatgaggatatgaatgagtactttacagttaatgcgattgactacgaatatgcaagtagagtatcactttggcaacataaatataacatgaaatatcaagcagaactaaattcagcagaatatgatgaggacaaggaaattgatgcagaaataaaaattgaagaaatcgcagatcgttcaattgttaagactaacaaaatcagagctcggaggcgtggcgctaggcatcaagagaatagcgcaagggctaagtcaatcagtaatgcgaacccggcctcgatacaaaaacatgaagatgaaatcgttagtgcagataatgacgattgggatattgattatgtctgagaaatcgtcaaatgagtgaaacgcgtgaggctcgtatatcaagagctaaaagggcatttgtatccacaccgagcgttaggaaaatcttgagttacatggatagatgtagagatctatcagacctagagtctgagcctacatgcatgatggtctatggtgcttcgggtgtaggtaaaacgaccgtcatcaagaaatacttaaatcaaaacagaagagagtccgaagccgggggcgatataataccggttttgcatattgagttgccagacaatgcgaagccagtagatgcagcaagggaattgctggttgaaatgggtgacccgctagcactttatgaaactgacttagctagattgacgaaaagactgactgaattaatccctgcggtcggcgtgaagctgattattatcgatgagttccaacatttggtggaagaaaggtcaaatcgggttcttacccaagtaggtaattggctaaaaatgatacttaacaaaacgaaatgtccaattgttatatttggtatgccatactcaaaagttgtactgcaagcaaactcgcaacttcacgggcgattttccattcaggttgaactgcgcccctttagctaccagggaggtagaggtgtatttaaaacttttttggaataccttgataaagccctaccttttgaaaaacaggctggcttagccaacgaaagtttgcagaaaaaattgtatgcattctctcagggaaacatgcgttcgttgagaaaccttatttatcaagcatctatcgaagcaattgataatcagcatgagacgataaccgaagaagatttcgtttttgcatcgaagttgacatcgggcgataaacccaactcatggaaaaatccttttgaggagggtgttgaggtaacagaagatatgttacgaccgccaccaaaagatattggttgggaggactatttgagacattcaaccccgagagtgagtaaaccaggtagaaataaaaactttttcgaataacctaggctgctgcgctgctgccaccgctgagcaataactagcataaccccttggggcctctaaacgggtcttgaggggttttttgctgaaacctcaggcatgttggaacaaccataaaatgataattacacccataaattgataattatcacacccataaattgatattgcctcttcatggtctaaacttcagtaagtttacgacattttcatgaagaggtcatttccggggatccatggagaaaaaaatcactggatataccaccgttgatatatcccaatggcatcgtaaagaacattttgaggcatttcagtcagttgctcaatgtacctataaccagaccgttcagctggatattacggcctttttaaagaccgtaaagaaaaataagcacaagttttatccggcctttattcacattcttgcccgcctgatgaatgctcatccggagttccgtatggcaatgaaagacggtgagctggtgatatgggatagtgttcacccttgttacaccgttttccatgagcaaactgaaacgttttcatcgctctggagtgaataccacgacgatttccggcagtttctacacatatattcgcaagatgtggcgtgttacggtgaaaacctggcctatttccctaaagggtttattgagaatatgtttttcgtctcagccaatccctgggtgagtttcaccagttttgatttaaacgtggccaatatggacaacttcttcgcccccgttttcactatgggcaaatattatacgcaaggcgacaaggtgctgatgccgctggcgattcaggttcatcatgccgtttgtgatggcttccatgtcggcagaatgcttaatgaattacaacagtactgcgatgagtggcagggcggggcgtaatttttttaaggcagttattggtgcccttctagagtccttactgcagtagttttgctgaaatactcgattcacaaaaatatcaacttatggttgttttgtgagatatcaatatatggttgttttgtggttaagttgctgattataaataattattaaatatcactttatggttgcatcaacaggtaccgagctcgaattcactggccgtcgttttacaacgtcgtgactgggaaaaccctggcgttacccaacttaatcgccttgcggccagtttgctcaggctctccccgtggaggtaataattgacgatatgatcatttattctgcctcccagagcctgataaaaacggtgaatccgttagcgaggtgccgccggcttccattcaggtcgaggtggcccggctccatgcaccgcgacgcaacgcggggaggcagacaaggtatagggcggcgaggcggctacagccgatagtctggaacagcgcacttacgggttgctgcgcaacccaagtgctaccggcgcggcagcgtgacccgtgtcggcggctccaacggctcgccatcgtccagaaaacacggctcatcgggcatcggcaggcgctgctgcccgcgccgttcccattcctccgtttcggtcaaggctggcaggtctggttccatgcccggaatgccgggctggctgggcggctcctcgccggggccggtcggtagttgctgctcgcccggatacagggtcgggatgcggcgcaggtcgccatgccccaacagcgattcgtcctggtcgtcgtgatcaaccaccacggcggcactgaacaccgacaggcgcaactggtcgcggggctggccccacgccacgcggtcattgaccacgtaggccgacacggtgccggggccgttgagcttcacgacggagatccagcgctcggccaccaagtccttgactgcgtattggaccgtccgcaaagaacgtccgatgagcttggaaagtgtcttctggctgaccaccacggcgttctggtggcccatctgcgccacgaggtgatgcagcagcattg

SEQ ID NO: 94 - DNA, 14028 bp, artificial sequence
  Synthetic
ccgccgtgggtttcctcgcaataagcccggcccacgcctcatgcgctttgcgttccgtttgcacccagtgaccgggcttgttcttggcttgaatgccgatttctctggactgcgtggccatgcttatctccatgcggtaggggtgccgcacggttgcggcaccatgcgcaatcagctgcaacttttcggcagcgcgacaacaattatgcgttgcgtaaaagtggcagtcaattacagattttctttaacctacgcaatgagctattgcggggggtgccgcaatgagctgttgcgtaccccccttttttaagttgttgatttttaagtctttcgcatttcgccctatatctagttctttggtgcccaaagaagggcacccctgcggggttcccccacgccttcggcgcggctccccctccggcaaaaagtggcccctccggggcttgttgatcgactgcgcggccttcggccttgcccaaggtggcgctgcccccttggaacccccgcactcgccgccgtgaggctcggggggcaggcgggcgggcttcgcccttcgactgcccccactcgcataggcttgggtcgttccaggcgcgtcaaggccaagccgctgcgcggtcgctgcgcgagccttgacccgccttccacttggtgtccaaccggcaagcgaagcgcgcaggccgcaggccggaggcttttccccagagaaaattaaaaaaattgatggggcaaggccgcaggccgcgcagttggagccggtgggtatgtggtcgaaggctgggtagccggtgggcaatccctgtggtcaagctcgtgggcaggcgcagcctgtccatcagcttgtccagcagggttgtccacgggccgagcgaagcgagccagccggtggccgctcgcggccatcgtccacatatccacgggctggcaagggagcgcagcgaccgcgcagggcgaagcccggagagcaagcccgtagggcgccgcagccgccgtaggcggtcacgactttgcgaagcaaagtctagtgagtatactcaagcattgagtggcccgccggaggcaccgccttgcgctgcccccgtcgagccggttggacaccaaaagggaggggcaggcatggcggcatacgcgatcatgcgatgcaagaagctggcgaaaatgggcaacgtggcggccagtctcaagcacgcctaccgcgagcgcgagacgcccaacgctgacgccagcaggacgccagagaacgagcactgggcggccagcagcaccgatgaagcgatgggccgactgcgcgagttgctgccagagaagcggcgcaaggacgctgtgttggcggtcgagtacgtcatgacggccagcccggaatggtggaagtcggccagccaagaacagcaggcggcgttcttcgagaaggcgcacaagtggctggcggacaagtacggggcggatcgcatcgtgacggccagcatccaccgtgacgaaaccagcccgcacatgaccgcgttcgtggtgccgctgacgcaggacggcaggctgtcggccaaggagttcatcggcaacaaagcgcagatgacccgcgaccagaccacgtttgcggccgctgtggccgatctagggctgcaacggggcatcgagggcagcaaggcacgtcacacgcgcattcaggcgttctacgaggccctggagcggccaccagtgggccacgtcaccatcagcccgcaagcggtcgagccacgcgcctatgcaccgcagggattggccgaaaagctgggaatctcaaagcgcgttgagacgccggaagccgtggccgaccggctgacaaaagcggttcggcaggggtatgagcctgccctacaggccgccgcaggagcgcgtgagatgcgcaagaaggccgatcaagcccaagagacggcccgtgaccttcgggagcgcctgaagcccgttctggacgccctggggccgttgaatcgggatatgcaggccaaggccgccgcgatcatcaaggccgtgggcgaaaagctgctgacggaacagcgggaagtccagcgccagaaacaggcccagcgccagcaggaacgcgggcgcgcacatttccccgaaaagtgccacctgggatgaatgtcagctactgggctatctggacaagggaaaacgcaagcgcaaagagaaagcaggtagcttgcagtgggcttacatggcgatagctagactgggcggttttatggacagcaagcgaaccggaattgccagctggggcgccctctggtaaggttgggaagccctgcaaagtaaactggatggctttcttgccgccaaggatctgatggcgcaggggatcaagatctgatcaagagacaggatgaggatcgtttcgcatgattgaacaagatggattgcacgcaggttctccggccgcttgggtggagaggctattcggctatgactgggcacaacagacaatcggctgctctgatgccgccgtgttccggctgtcagcgcaggggcgcccggttctttttgtcaagaccgacctgtccggtgccctgaatgaactgcaagacgaggcagcgcggctatcgtggctggccacgacgggcgttccttgcgcagctgtgctcgacgttgtcactgaagcgggaagggactggctgctattgggcgaagtgccggggcaggatctcctgtcatctcaccttgctcctgccgagaaagtatccatcatggctgatgcaatgcggcggctgcatacgcttgatccggctacctgcccattcgaccaccaagcgaaacatcgcatcgagcgagcacgtactcggatggaagccggtcttgtcgatcaggatgatctggacgaagagcatcaggggctcgcgccagccgaactgttcgccaggctcaaggcgcgcatgcccgacggcgaggatctcgtcgtgacccatggcgatgcctgcttgccgaatatcatggtggaaaatggccgcttttctggattcatcgactgtggccggctgggtgtggcggaccgctatcaggacatagcgttggctacccgtgatattgctgaagagcttggcggcgaatgggctgaccgcttcctcgtgctttacggtatcgccgctcccgattcgcagcgcatcgccttctatcgccttcttgacgagttcttctgagcgggactctggggttcgaaatgaccgaccaagcgacgcccaacctgccatcacgagatttcgattccaccgccgccttctatgaaaggttgggcttcggaatcgttttccgggacgccggctggatgatcctccagcgcggggatctcatgctggagttcttcgcccacccccatgggcaaatattatacgcaaggcgacaaggtgctgatgccgctggcgattcaggttcatcatgccgtttgtgatggcttccatgtcggcagaatgcttaatgaattacaacagtttttatgcatgcgcccaatacgcaaaccgcctctccccgcgcgttggccgattcattaatgcagctggcacgacaggtttcccgactggtggataaccgtattaccgcctttgagtgagctgataccgctcgccgcagccgaacgaccgagcgcagcgagtcagtgagcgaggacacaagcttttacggctagctcagtcctaggtactatgctagcgtcgacgtggagatataccatgggtgaactgccgagtaggtagctgataacagtacagcgcggctgaaatcatcattaaagcggtgaactgccgagtaggtagctgataacggatccgaattcgagcgaaggagatatacatatgtttttgcaaagacctaaaccttacagcgatgaaagtttagaaagtttctttatccgagtggctaacaaaaatggctacggtgatgtccatcgcttcctagaagccactaaacgattccttcaagacattgaccataatggctatcaaacctttccgactgatataactcggataaacccatactcagctaaaaacagttccagcgcacgaactgcgtcattcctgaaacttgcacaattgacatttaatgaaccgccagagctacttgggttggcaattaacagaacaaacatgaaatactcgccgtcaactagcgcggttgttagaggtgcagaagtctttcctcgcagtttactacggacgcactccatcccctgctgtcctttgtgtctgcgagaaaatggctacgcctcctacctttggcactttcaggggtacgaatactgccacagccataacgtacctttaattaccacttgtagctgtggtaaggagtttgactaccgagtatctgggttaaagggcatttgctgcaaatgcaaggagcctatcaccttaaccagcagggagaacggtcatgaggcagcgtgtactgtttcaaactggcttgctggccatgaatctaaacctctgccaaatcttcctaaaagctaccgatggggtttagttcattggtggatgggtattaaagatagcgagttcgatcacttttcgttcgttcaatttttctcaaactggccaaggtcattccactcgataatcgaagatgaagtagagttcaaccttgagcatgctgttgtcagcacgtctgaattacgactaaaagatcttcttggtcgattgtttttcggttcaattcggttacctgagcggaatcttcaacacaatatcatccttggtgagcttctctgctatttagaaaatcgtttatggcaagacaagggattaatcgccaacctcaaaatgaacgcgttagaggcgactgtaatgttaaattgtagcctcgatcagattgcatcaatggttgaacaacgcatcttgaagccaaatcgaaaaagcaagcccaacagccctcttgatgttaccgattatctatttcatttcggcgatattttctgtctttggttagctgagttccaaagcgatgagtttaaccgttcgttttatgtgtcgaggtggtaaatgcaaactctgaaagaactaatcgcatccaatcctgacgacttaacaactgaacttaagagagcatttcgtccactcacaccgcatattgcaattgatggtaatgaacttgacgcactgacgatattagtcaatttaaccgataagactgatgatcagaaagacctgctcgatcgagccaaatgcaagcaaaaacttcgagatgaaaaatggtgggctagctgcataaattgcgttaattacagacaaagccataacccaaaattcccggatatacgttctgaaggcgtgattcgaacccaagccctgggtgaattaccgagtttcctactctcgtcctcaaaaatcccaccataccattggtcatatagccatgattcaaaatacgtcaacaaaagcgcattcctcaccaatgagttttgttgggatggtgagatctcatgtttgggtgagcttcttaaagatgcagatcacccactttggaatactttgaaaaagttaggttgttctcaaaaaacttgcaaagcaatggcaaaacaactagctgatattactctcacgactatcaatgtcacactcgcaccaaattacctgactcaaatatctctccccgatagtgatacatcctacatttcactctctcctgttgcatcgctatcgatgcaaagccactttcatcagaggctccaagatgaaaatcggcatagcgcgataacgcggtttagccgaactaccaacatgggggtcactgcgatgacatgtggcggcgcatttagaatgttaaagtctggcgctaagttttccagcccccctcatcaccgattaaacagtaaacgaagttggttgacgtcagagcatgttcagtcattaaaacagtaccagcgcctcaacaaaagcctcatacctgaaaactctcggattgcactccgtagaaaatacaaaatcgagcttcaaaatatggtcagatcttggtttgcaatgcaagaccatacccttgattcgaacatacttatccaacatttgaatcatgacctatcttacttaggagccacaaaacgttttgcatacgatccagcgatgaccaagctctttactgagcttttgaaacgagagttatcaaattcaatcaataatggtgagcaacacactaatggatcgtttttagtcctaccgaatatcagggtttgtggcgcaacagctttaagctccccggtaacggtggggattccatcacttacagctttctttggcttcgttcacgcatttgaacggaatataaatcgcaccacctcatcgtttcgtgttgaatcctttgcgatatgcgtccatcaactacatgtcgagaagcgaggtttgacagcagagtttgtggaaaaaggcgacgggactatatccgctcccgcgacccgggatgactggcagtgtgatgtcgtatttagccttattttgaacaccaactttgctcaacatattgaccaagatacgttagttacatcactaccaaagcgattggctcggggttcagcaaaaattgcgattgatgactttaaacatatcaactcattctcgacattagaaacagcgatcgaatctctgccaatagaagctggtaggtggttatcactttacgcacagtcaaacaataatctaagtgatctattagcagccatgacagaggaccatcagctcatggcaagctgcgtcggttaccacttgttagaagagcccaaagataaaccaaactccctcagaggttacaaacacgctatcgccgagtgcatcattggactcattaactcaatcacctttagctcagagactgatcccaacacaatcttttggtcgctaaagaactatcaaaactacctagtggtacagccaaggagtatcaacgatgaaactaccgacaaatctagcctatgagcgctctatcgacccatcagatgtctgtttttttgtcgtctggcccgatgatagaaaaacacctttaacctacaattctcgtactctgctcgggcaaatggaagcggcatcattagcctatgatgtctcaggtcaaccaataaaaagtgccaccgctgaggcgttagctcaagggaaccctcatcaagttgatttctgccacgttccatacggtgcgagtcatattgaatgcagtttctccgtctcgttttcttctgaactacgtcaaccatataagtgtaactcaagcaaagttaaacaaacgctagtgcaattagtcgagctctacgaaacgaaaatcggctggactgagctagcaacccgatatttgatgaacatttgcaacggtaaatggctgtggaaaaatacccgtaaagcctattgctggaacattgtacttacaccttggccttggaacggggaaaaggttggatttgaagatattcgtactaactacacctcacggcaagactttaaaaataataaaaattggtctgctatagttgaaatgatcaaaaccgcattttctagtactgatgggctggcgatatttgaagtcagggccaccttgcacttgccaacgaatgctatggtgcggccaagccaagttttcacagaaaaagaaagtggcagtaaaagtaaatctaaaactcaaaacagtcgagtttttcagagtacaactattgatggtgaacgatcgccaatactaggggcctttaaaacgggagcagctattgcaaccattgacgactggtatcctgaagccactgagccactaagggtcggacggtttggggttcatcgcgaagatgtcacttgctaccgtcatccgtctaccggaaaagattttttctcgatattacaacaagcagagcactatattgaagtgttgagcgccaacaaaactcccgctcaagaaactatcaacgacatgcactttttaatggctaacctgattaagggtgggatgttccagcataaaggagactgactgtgaaatggtattataagacaatcacctttctgccagagttgtgcaacaacgagtcactggctgcaaagtgtctccgcgttctgcatggatttaactatcagtatgagacacgaaatatcggcgtttcatttccgctttggtgtgatgcaacggttggaaaaaagatttcatttgtcagcaagaacaagatagaactcgacttactacttaaacaacactatttcgtccaaatggaacaacttcaatactttcatatatccaacactgttctcgtcccagaagattgtacatacgtttcctttagacgctgtcaatctatagataagctcacagcagcagggctggcaaggaaaatcagacgcctggagaaacgtgctctatctagaggcgagcaatttgacccatcatcttttgctcaaaaagagcatactgcaatagcgcactaccactcacttggggagtccagcaaacagacgaaccgcaactttcgactcaatatcaggatgctctcggagcaaccccgtgaggggaactcgatttttagtagctatggcttatcaaattcagaaaactcgtttcagcctgtacccttaatctgacctttaataaggagatataccatggcgacaagtttacctacgccctcagcaattacgacttcggcgttagagtatgcattccatactcccgctcgcaatctaacgaaatctcgcggaaaaaacattcatcgttatgtcagtgtaaagatgagtaagaggattacggtagaatctactctagagtgtgatgcctgctatcactttgattttgagccaagtattgttcgcttttgcgctcaaccgattcgatttttatattatctcaatggtcagtctcactcctatgttcctgactttctagttcaatttgataccaacgagtttgttctatatgaagtaaagtcagcttatgctaagaacaaacctgattttgatgttgaatgggaggcgaaagtaaaagcagcaactgaactagggctagaattggagcttgttgaagagagtgatattagggatacggttgtattaaataatcttaagcgcatgcatcgttatgcttcgaaagatgagctgaataacgtacataactctctcttaaaaataataaagtacaatggcgcccaatctgcaagatgcttgggagaacagttgggtttaaaaggccgaactgttttaccaattttgtgcgatttgctgtcaaggtgtttactcgatacacgtttggataagcctctatctcttgaatctcgatttgagttggccagttatggctaagaaagggttctcaagtttccatagaaaagcagtctcttcccaagatacgcttgaatcgatagagcttgtctctagcgctaattgtctagaaagtgttacgtatcaagatatatcagcatttcccgaaacaattgcggtagagattaatttccgattaagcattcttcgctttttagcgcgaaagtgcgaaaccattgtggccaaatcaattgaaccacatcgtgtagagctacagcaaaactatagtagaaaaatacccagtgcaataacgatatatcgatggtggcttgcttttcgaaaatcagactacaaccccattagcttagcacctaatatcaaggatagaggtaatagagagacaaaagtgtcaacagttgttgattctattatggaacaggcagttgaaagagttatatctggacgaaaagtcaatgttagctctgcatataaacgtgttcgacgaaaagttcgtcaatacaatctaactcatggaacgaaatacacgtatcctaagtacgaatctgtaagaaagcgagtaaaaaagaaaaccccatttgagttattagccgcagggaaaggggagagagtagctaagagagagtttcgccgaatgggaaaaaagatcctcacgtctagcgtgctagagagggttgaaatagatcacactgtcgttgacctttttgcagtacacgaagagtatcgaatcccattgggccgaccttggcttactcaattggttgattgttacagtaaagctgtaatcggtttttatttaggtttcgagcctcctagctatgtgtcggtttcccttgcacttaagaatgcaatacaacgcaaagatgacttaatctcctcgtatgaatcgatcgagaatgaatggctatgttatggcatcccagacctactcgtaactgataatggtaaagagtttttgtcgaaagcatttgatcaagcatgtgaatcactattgatcaatgtgcatcaaaataaagttgagacgcccgacaacaaacctcatgttgaacgtaactacgggactattaatacttctctgttagacgatttacctgggaaatccttcagccagtaccttcaaagagaagggtacgactctgtgggagaagctacccttacactcaatgagattagagaaatttacttaatttggttggtggatatttatcataaaaaacccaatcagagaggcactaattgtcctaatgttgcgtggaaaaagggttgtcaagaatgggaaccagaggagttctctggttctaaagacgaattagactttaaatttgctattgttgattacaaacaacttactaaagtagggataactgtctacaaagaactgagttatagcaatgaccgtttagctgaatatagagggaagaaaggaaaccataaagttcagttcaagtataaccctgagtgtatggcagttatttgggtgttggatgaggatatgaatgagtactttacagttaatgcgattgactacgaatatgcaagtagagtatcactttggcaacataaatataacatgaaatatcaagcagaactaaattcagcagaatatgatgaggacaaggaaattgatgcagaaataaaaattgaagaaatcgcagatcgttcaattgttaagactaacaaaatcagagctcggaggcgtggcgctaggcatcaagagaatagcgcaagggctaagtcaatcagtaatgcgaacccggcctcgatacaaaaacatgaagatgaaatcgttagtgcagataatgacgattgggatattgattatgtctgagaaatcgtcaaatgagtgaaacgcgtgaggctcgtatatcaagagctaaaagggcatttgtatccacaccgagcgttaggaaaatcttgagttacatggatagatgtagagatctatcagacctagagtctgagcctacatgcatgatggtctatggtgcttcgggtgtaggtaaaacgaccgtcatcaagaaatacttaaatcaaaacagaagagagtccgaagccgggggcgatataataccggttttgcatattgagttgccagacaatgcgaagccagtagatgcagcaagggaattgctggttgaaatgggtgacccgctagcactttatgaaactgacttagctagattgacgaaaagactgactgaattaatccctgcggtcggcgtgaagctgattattatcgatgagttccaacatttggtggaagaaaggtcaaatcgggttcttacccaagtaggtaattggctaaaaatgatacttaacaaaacgaaatgtccaattgttatatttggtatgccatactcaaaagttgtactgcaagcaaactcgcaacttcacgggcgattttccattcaggttgaactgcgcccctttagctaccagggaggtagaggtgtatttaaaacttttttggaataccttgataaagccctaccttttgaaaaacaggctggcttagccaacgaaagtttgcagaaaaaattgtatgcattctctcagggaaacatgcgttcgttgagaaaccttatttatcaagcatctatcgaagcaattgataatcagcatgagacgataaccgaagaagatttcgtttttgcatcgaagttgacatcgggcgataaacccaactcatggaaaaatccttttgaggagggtgttgaggtaacagaagatatgttacgaccgccaccaaaagatattggttgggaggactatttgagacattcaaccccgagagtgagtaaaccaggtagaaataaaaactttttcgaataacctaggctgctgcgctgctgccaccgctgagcaataactagcataaccccttggggcctctaaacgggtcttgaggggttttttgctgaaacctcaggcatgttggaacaaccataaaatgataattacacccataaattgataattatcacacccataaattgatattgcctcttcatggtctaaacttcagtaagtttacgacattttcatgaagaggtcatttccggggatccatggagaaaaaaatcactggatataccaccgttgatatatcccaatggcatcgtaaagaacattttgaggcatttcagtcagttgctcaatgtacctataaccagaccgttcagctggatattacggcctttttaaagaccgtaaagaaaaataagcacaagttttatccggcctttattcacattcttgcccgcctgatgaatgctcatccggagttccgtatggcaatgaaagacggtgagctggtgatatgggatagtgttcacccttgttacaccgttttccatgagcaaactgaaacgttttcatcgctctggagtgaataccacgacgatttccggcagtttctacacatatattcgcaagatgtggcgtgttacggtgaaaacctggcctatttccctaaagggtttattgagaatatgtttttcgtctcagccaatccctgggtgagtttcaccagttttgatttaaacgtggccaatatggacaacttcttcgcccccgttttcactatgggcaaatattatacgcaaggcgacaaggtgctgatgccgctggcgattcaggttcatcatgccgtttgtgatggcttccatgtcggcagaatgcttaatgaattacaacagtactgcgatgagtggcagggcggggcgtaatttttttaaggcagttattggtgcccttctagagtccttactgcagtagttttgctgaaatactcgattcacaaaaatatcaacttatggttgttttgtgagatatcaatatatggttgttttgtggttaagttgctgattataaataattattaaatatcactttatggttgcatcaacaggtaccgagctcgaattcactggccgtcgttttacaacgtcgtgactgggaaaaccctggcgttacccaacttaatcgccttgcggccagtttgctcaggctctccccgtggaggtaataattgacgatatgatcatttattctgcctcccagagcctgataaaaacggtgaatccgttagcgaggtgccgccggcttccattcaggtcgaggtggcccggctccatgcaccgcgacgcaacgcggggaggcagacaaggtatagggcggcgaggcggctacagccgatagtctggaacagcgcacttacgggttgctgcgcaacccaagtgctaccggcgcggcagcgtgacccgtgtcggcggctccaacggctcgccatcgtccagaaaacacggctcatcgggcatcggcaggcgctgctgcccgcgccgttcccattcctccgtttcggtcaaggctggcaggtctggttccatgcccggaatgccgggctggctgggcggctcctcgccggggccggtcggtagttgctgctcgcccggatacagggtcgggatgcggcgcaggtcgccatgccccaacagcgattcgtcctggtcgtcgtgatcaaccaccacggcggcactgaacaccgacaggcgcaactggtcgcggggctggccccacgccacgcggtcattgaccacgtaggccgacacggtgccggggccgttgagcttcacgacggagatccagcgctcggccaccaagtccttgactgcgtattggaccgtccgcaaagaacgtccgatgagcttggaaagtgtcttctggctgaccaccacggcgttctggtggcccatctgcgccacgaggtgatgcagcagcattg

SEQ ID NO: 95 - DNA, 14028 bp, artificial sequence
  Synthetic
ccgccgtgggtttcctcgcaataagcccggcccacgcctcatgcgctttgcgttccgtttgcacccagtgaccgggcttgttcttggcttgaatgccgatttctctggactgcgtggccatgcttatctccatgcggtaggggtgccgcacggttgcggcaccatgcgcaatcagctgcaacttttcggcagcgcgacaacaattatgcgttgcgtaaaagtggcagtcaattacagattttctttaacctacgcaatgagctattgcggggggtgccgcaatgagctgttgcgtaccccccttttttaagttgttgatttttaagtctttcgcatttcgccctatatctagttctttggtgcccaaagaagggcacccctgcggggttcccccacgccttcggcgcggctccccctccggcaaaaagtggcccctccggggcttgttgatcgactgcgcggccttcggccttgcccaaggtggcgctgcccccttggaacccccgcactcgccgccgtgaggctcggggggcaggcgggcgggcttcgcccttcgactgcccccactcgcataggcttgggtcgttccaggcgcgtcaaggccaagccgctgcgcggtcgctgcgcgagccttgacccgccttccacttggtgtccaaccggcaagcgaagcgcgcaggccgcaggccggaggcttttccccagagaaaattaaaaaaattgatggggcaaggccgcaggccgcgcagttggagccggtgggtatgtggtcgaaggctgggtagccggtgggcaatccctgtggtcaagctcgtgggcaggcgcagcctgtccatcagcttgtccagcagggttgtccacgggccgagcgaagcgagccagccggtggccgctcgcggccatcgtccacatatccacgggctggcaagggagcgcagcgaccgcgcagggcgaagcccggagagcaagcccgtagggcgccgcagccgccgtaggcggtcacgactttgcgaagcaaagtctagtgagtatactcaagcattgagtggcccgccggaggcaccgccttgcgctgcccccgtcgagccggttggacaccaaaagggaggggcaggcatggcggcatacgcgatcatgcgatgcaagaagctggcgaaaatgggcaacgtggcggccagtctcaagcacgcctaccgcgagcgcgagacgcccaacgctgacgccagcaggacgccagagaacgagcactgggcggccagcagcaccgatgaagcgatgggccgactgcgcgagttgctgccagagaagcggcgcaaggacgctgtgttggcggtcgagtacgtcatgacggccagcccggaatggtggaagtcggccagccaagaacagcaggcggcgttcttcgagaaggcgcacaagtggctggcggacaagtacggggcggatcgcatcgtgacggccagcatccaccgtgacgaaaccagcccgcacatgaccgcgttcgtggtgccgctgacgcaggacggcaggctgtcggccaaggagttcatcggcaacaaagcgcagatgacccgcgaccagaccacgtttgcggccgctgtggccgatctagggctgcaacggggcatcgagggcagcaaggcacgtcacacgcgcattcaggcgttctacgaggccctggagcggccaccagtgggccacgtcaccatcagcccgcaagcggtcgagccacgcgcctatgcaccgcagggattggccgaaaagctgggaatctcaaagcgcgttgagacgccggaagccgtggccgaccggctgacaaaagcggttcggcaggggtatgagcctgccctacaggccgccgcaggagcgcgtgagatgcgcaagaaggccgatcaagcccaagagacggcccgtgaccttcgggagcgcctgaagcccgttctggacgccctggggccgttgaatcgggatatgcaggccaaggccgccgcgatcatcaaggccgtgggcgaaaagctgctgacggaacagcgggaagtccagcgccagaaacaggcccagcgccagcaggaacgcgggcgcgcacatttccccgaaaagtgccacctgggatgaatgtcagctactgggctatctggacaagggaaaacgcaagcgcaaagagaaagcaggtagcttgcagtgggcttacatggcgatagctagactgggcggttttatggacagcaagcgaaccggaattgccagctggggcgccctctggtaaggttgggaagccctgcaaagtaaactggatggctttcttgccgccaaggatctgatggcgcaggggatcaagatctgatcaagagacaggatgaggatcgtttcgcatgattgaacaagatggattgcacgcaggttctccggccgcttgggtggagaggctattcggctatgactgggcacaacagacaatcggctgctctgatgccgccgtgttccggctgtcagcgcaggggcgcccggttctttttgtcaagaccgacctgtccggtgccctgaatgaactgcaagacgaggcagcgcggctatcgtggctggccacgacgggcgttccttgcgcagctgtgctcgacgttgtcactgaagcgggaagggactggctgctattgggcgaagtgccggggcaggatctcctgtcatctcaccttgctcctgccgagaaagtatccatcatggctgatgcaatgcggcggctgcatacgcttgatccggctacctgcccattcgaccaccaagcgaaacatcgcatcgagcgagcacgtactcggatggaagccggtcttgtcgatcaggatgatctggacgaagagcatcaggggctcgcgccagccgaactgttcgccaggctcaaggcgcgcatgcccgacggcgaggatctcgtcgtgacccatggcgatgcctgcttgccgaatatcatggtggaaaatggccgcttttctggattcatcgactgtggccggctgggtgtggcggaccgctatcaggacatagcgttggctacccgtgatattgctgaagagcttggcggcgaatgggctgaccgcttcctcgtgctttacggtatcgccgctcccgattcgcagcgcatcgccttctatcgccttcttgacgagttcttctgagcgggactctggggttcgaaatgaccgaccaagcgacgcccaacctgccatcacgagatttcgattccaccgccgccttctatgaaaggttgggcttcggaatcgttttccgggacgccggctggatgatcctccagcgcggggatctcatgctggagttcttcgcccacccccatgggcaaatattatacgcaaggcgacaaggtgctgatgccgctggcgattcaggttcatcatgccgtttgtgatggcttccatgtcggcagaatgcttaatgaattacaacagtttttatgcatgcgcccaatacgcaaaccgcctctccccgcgcgttggccgattcattaatgcagctggcacgacaggtttcccgactggtggataaccgtattaccgcctttgagtgagctgataccgctcgccgcagccgaacgaccgagcgcagcgagtcagtgagcgaggacacaagcttttatggctagctcagtcctaggtacaatgctagcgtcgacgtggagatataccatgggtgaactgccgagtaggtagctgataacagtacagcgcggctgaaatcatcattaaagcggtgaactgccgagtaggtagctgataacggatccgaattcgagcgaaggagatatacatatgtttttgcaaagacctaaaccttacagcgatgaaagtttagaaagtttctttatccgagtggctaacaaaaatggctacggtgatgtccatcgcttcctagaagccactaaacgattccttcaagacattgaccataatggctatcaaacctttccgactgatataactcggataaacccatactcagctaaaaacagttccagcgcacgaactgcgtcattcctgaaacttgcacaattgacatttaatgaaccgccagagctacttgggttggcaattaacagaacaaacatgaaatactcgccgtcaactagcgcggttgttagaggtgcagaagtctttcctcgcagtttactacggacgcactccatcccctgctgtcctttgtgtctgcgagaaaatggctacgcctcctacctttggcactttcaggggtacgaatactgccacagccataacgtacctttaattaccacttgtagctgtggtaaggagtttgactaccgagtatctgggttaaagggcatttgctgcaaatgcaaggagcctatcaccttaaccagcagggagaacggtcatgaggcagcgtgtactgtttcaaactggcttgctggccatgaatctaaacctctgccaaatcttcctaaaagctaccgatggggtttagttcattggtggatgggtattaaagatagcgagttcgatcacttttcgttcgttcaatttttctcaaactggccaaggtcattccactcgataatcgaagatgaagtagagttcaaccttgagcatgctgttgtcagcacgtctgaattacgactaaaagatcttcttggtcgattgtttttcggttcaattcggttacctgagcggaatcttcaacacaatatcatccttggtgagcttctctgctatttagaaaatcgtttatggcaagacaagggattaatcgccaacctcaaaatgaacgcgttagaggcgactgtaatgttaaattgtagcctcgatcagattgcatcaatggttgaacaacgcatcttgaagccaaatcgaaaaagcaagcccaacagccctcttgatgttaccgattatctatttcatttcggcgatattttctgtctttggttagctgagttccaaagcgatgagtttaaccgttcgttttatgtgtcgaggtggtaaatgcaaactctgaaagaactaatcgcatccaatcctgacgacttaacaactgaacttaagagagcatttcgtccactcacaccgcatattgcaattgatggtaatgaacttgacgcactgacgatattagtcaatttaaccgataagactgatgatcagaaagacctgctcgatcgagccaaatgcaagcaaaaacttcgagatgaaaaatggtgggctagctgcataaattgcgttaattacagacaaagccataacccaaaattcccggatatacgttctgaaggcgtgattcgaacccaagccctgggtgaattaccgagtttcctactctcgtcctcaaaaatcccaccataccattggtcatatagccatgattcaaaatacgtcaacaaaagcgcattcctcaccaatgagttttgttgggatggtgagatctcatgtttgggtgagcttcttaaagatgcagatcacccactttggaatactttgaaaaagttaggttgttctcaaaaaacttgcaaagcaatggcaaaacaactagctgatattactctcacgactatcaatgtcacactcgcaccaaattacctgactcaaatatctctccccgatagtgatacatcctacatttcactctctcctgttgcatcgctatcgatgcaaagccactttcatcagaggctccaagatgaaaatcggcatagcgcgataacgcggtttagccgaactaccaacatgggggtcactgcgatgacatgtggcggcgcatttagaatgttaaagtctggcgctaagttttccagcccccctcatcaccgattaaacagtaaacgaagttggttgacgtcagagcatgttcagtcattaaaacagtaccagcgcctcaacaaaagcctcatacctgaaaactctcggattgcactccgtagaaaatacaaaatcgagcttcaaaatatggtcagatcttggtttgcaatgcaagaccatacccttgattcgaacatacttatccaacatttgaatcatgacctatcttacttaggagccacaaaacgttttgcatacgatccagcgatgaccaagctctttactgagcttttgaaacgagagttatcaaattcaatcaataatggtgagcaacacactaatggatcgtttttagtcctaccgaatatcagggtttgtggcgcaacagctttaagctccccggtaacggtggggattccatcacttacagctttctttggcttcgttcacgcatttgaacggaatataaatcgcaccacctcatcgtttcgtgttgaatcctttgcgatatgcgtccatcaactacatgtcgagaagcgaggtttgacagcagagtttgtggaaaaaggcgacgggactatatccgctcccgcgacccgggatgactggcagtgtgatgtcgtatttagccttattttgaacaccaactttgctcaacatattgaccaagatacgttagttacatcactaccaaagcgattggctcggggttcagcaaaaattgcgattgatgactttaaacatatcaactcattctcgacattagaaacagcgatcgaatctctgccaatagaagctggtaggtggttatcactttacgcacagtcaaacaataatctaagtgatctattagcagccatgacagaggaccatcagctcatggcaagctgcgtcggttaccacttgttagaagagcccaaagataaaccaaactccctcagaggttacaaacacgctatcgccgagtgcatcattggactcattaactcaatcacctttagctcagagactgatcccaacacaatcttttggtcgctaaagaactatcaaaactacctagtggtacagccaaggagtatcaacgatgaaactaccgacaaatctagcctatgagcgctctatcgacccatcagatgtctgtttttttgtcgtctggcccgatgatagaaaaacacctttaacctacaattctcgtactctgctcgggcaaatggaagcggcatcattagcctatgatgtctcaggtcaaccaataaaaagtgccaccgctgaggcgttagctcaagggaaccctcatcaagttgatttctgccacgttccatacggtgcgagtcatattgaatgcagtttctccgtctcgttttcttctgaactacgtcaaccatataagtgtaactcaagcaaagttaaacaaacgctagtgcaattagtcgagctctacgaaacgaaaatcggctggactgagctagcaacccgatatttgatgaacatttgcaacggtaaatggctgtggaaaaatacccgtaaagcctattgctggaacattgtacttacaccttggccttggaacggggaaaaggttggatttgaagatattcgtactaactacacctcacggcaagactttaaaaataataaaaattggtctgctatagttgaaatgatcaaaaccgcattttctagtactgatgggctggcgatatttgaagtcagggccaccttgcacttgccaacgaatgctatggtgcggccaagccaagttttcacagaaaaagaaagtggcagtaaaagtaaatctaaaactcaaaacagtcgagtttttcagagtacaactattgatggtgaacgatcgccaatactaggggcctttaaaacgggagcagctattgcaaccattgacgactggtatcctgaagccactgagccactaagggtcggacggtttggggttcatcgcgaagatgtcacttgctaccgtcatccgtctaccggaaaagattttttctcgatattacaacaagcagagcactatattgaagtgttgagcgccaacaaaactcccgctcaagaaactatcaacgacatgcactttttaatggctaacctgattaagggtgggatgttccagcataaaggagactgactgtgaaatggtattataagacaatcacctttctgccagagttgtgcaacaacgagtcactggctgcaaagtgtctccgcgttctgcatggatttaactatcagtatgagacacgaaatatcggcgtttcatttccgctttggtgtgatgcaacggttggaaaaaagatttcatttgtcagcaagaacaagatagaactcgacttactacttaaacaacactatttcgtccaaatggaacaacttcaatactttcatatatccaacactgttctcgtcccagaagattgtacatacgtttcctttagacgctgtcaatctatagataagctcacagcagcagggctggcaaggaaaatcagacgcctggagaaacgtgctctatctagaggcgagcaatttgacccatcatcttttgctcaaaaagagcatactgcaatagcgcactaccactcacttggggagtccagcaaacagacgaaccgcaactttcgactcaatatcaggatgctctcggagcaaccccgtgaggggaactcgatttttagtagctatggcttatcaaattcagaaaactcgtttcagcctgtacccttaatctgacctttaataaggagatataccatggcgacaagtttacctacgccctcagcaattacgacttcggcgttagagtatgcattccatactcccgctcgcaatctaacgaaatctcgcggaaaaaacattcatcgttatgtcagtgtaaagatgagtaagaggattacggtagaatctactctagagtgtgatgcctgctatcactttgattttgagccaagtattgttcgcttttgcgctcaaccgattcgatttttatattatctcaatggtcagtctcactcctatgttcctgactttctagttcaatttgataccaacgagtttgttctatatgaagtaaagtcagcttatgctaagaacaaacctgattttgatgttgaatgggaggcgaaagtaaaagcagcaactgaactagggctagaattggagcttgttgaagagagtgatattagggatacggttgtattaaataatcttaagcgcatgcatcgttatgcttcgaaagatgagctgaataacgtacataactctctcttaaaaataataaagtacaatggcgcccaatctgcaagatgcttgggagaacagttgggtttaaaaggccgaactgttttaccaattttgtgcgatttgctgtcaaggtgtttactcgatacacgtttggataagcctctatctcttgaatctcgatttgagttggccagttatggctaagaaagggttctcaagtttccatagaaaagcagtctcttcccaagatacgcttgaatcgatagagcttgtctctagcgctaattgtctagaaagtgttacgtatcaagatatatcagcatttcccgaaacaattgcggtagagattaatttccgattaagcattcttcgctttttagcgcgaaagtgcgaaaccattgtggccaaatcaattgaaccacatcgtgtagagctacagcaaaactatagtagaaaaatacccagtgcaataacgatatatcgatggtggcttgcttttcgaaaatcagactacaaccccattagcttagcacctaatatcaaggatagaggtaatagagagacaaaagtgtcaacagttgttgattctattatggaacaggcagttgaaagagttatatctggacgaaaagtcaatgttagctctgcatataaacgtgttcgacgaaaagttcgtcaatacaatctaactcatggaacgaaatacacgtatcctaagtacgaatctgtaagaaagcgagtaaaaaagaaaaccccatttgagttattagccgcagggaaaggggagagagtagctaagagagagtttcgccgaatgggaaaaaagatcctcacgtctagcgtgctagagagggttgaaatagatcacactgtcgttgacctttttgcagtacacgaagagtatcgaatcccattgggccgaccttggcttactcaattggttgattgttacagtaaagctgtaatcggtttttatttaggtttcgagcctcctagctatgtgtcggtttcccttgcacttaagaatgcaatacaacgcaaagatgacttaatctcctcgtatgaatcgatcgagaatgaatggctatgttatggcatcccagacctactcgtaactgataatggtaaagagtttttgtcgaaagcatttgatcaagcatgtgaatcactattgatcaatgtgcatcaaaataaagttgagacgcccgacaacaaacctcatgttgaacgtaactacgggactattaatacttctctgttagacgatttacctgggaaatccttcagccagtaccttcaaagagaagggtacgactctgtgggagaagctacccttacactcaatgagattagagaaatttacttaatttggttggtggatatttatcataaaaaacccaatcagagaggcactaattgtcctaatgttgcgtggaaaaagggttgtcaagaatgggaaccagaggagttctctggttctaaagacgaattagactttaaatttgctattgttgattacaaacaacttactaaagtagggataactgtctacaaagaactgagttatagcaatgaccgtttagctgaatatagagggaagaaaggaaaccataaagttcagttcaagtataaccctgagtgtatggcagttatttgggtgttggatgaggatatgaatgagtactttacagttaatgcgattgactacgaatatgcaagtagagtatcactttggcaacataaatataacatgaaatatcaagcagaactaaattcagcagaatatgatgaggacaaggaaattgatgcagaaataaaaattgaagaaatcgcagatcgttcaattgttaagactaacaaaatcagagctcggaggcgtggcgctaggcatcaagagaatagcgcaagggctaagtcaatcagtaatgcgaacccggcctcgatacaaaaacatgaagatgaaatcgttagtgcagataatgacgattgggatattgattatgtctgagaaatcgtcaaatgagtgaaacgcgtgaggctcgtatatcaagagctaaaagggcatttgtatccacaccgagcgttaggaaaatcttgagttacatggatagatgtagagatctatcagacctagagtctgagcctacatgcatgatggtctatggtgcttcgggtgtaggtaaaacgaccgtcatcaagaaatacttaaatcaaaacagaagagagtccgaagccgggggcgatataataccggttttgcatattgagttgccagacaatgcgaagccagtagatgcagcaagggaattgctggttgaaatgggtgacccgctagcactttatgaaactgacttagctagattgacgaaaagactgactgaattaatccctgcggtcggcgtgaagctgattattatcgatgagttccaacatttggtggaagaaaggtcaaatcgggttcttacccaagtaggtaattggctaaaaatgatacttaacaaaacgaaatgtccaattgttatatttggtatgccatactcaaaagttgtactgcaagcaaactcgcaacttcacgggcgattttccattcaggttgaactgcgcccctttagctaccagggaggtagaggtgtatttaaaacttttttggaataccttgataaagccctaccttttgaaaaacaggctggcttagccaacgaaagtttgcagaaaaaattgtatgcattctctcagggaaacatgcgttcgttgagaaaccttatttatcaagcatctatcgaagcaattgataatcagcatgagacgataaccgaagaagatttcgtttttgcatcgaagttgacatcgggcgataaacccaactcatggaaaaatccttttgaggagggtgttgaggtaacagaagatatgttacgaccgccaccaaaagatattggttgggaggactatttgagacattcaaccccgagagtgagtaaaccaggtagaaataaaaactttttcgaataacctaggctgctgcgctgctgccaccgctgagcaataactagcataaccccttggggcctctaaacgggtcttgaggggttttttgctgaaacctcaggcatgttggaacaaccataaaatgataattacacccataaattgataattatcacacccataaattgatattgcctcttcatggtctaaacttcagtaagtttacgacattttcatgaagaggtcatttccggggatccatggagaaaaaaatcactggatataccaccgttgatatatcccaatggcatcgtaaagaacattttgaggcatttcagtcagttgctcaatgtacctataaccagaccgttcagctggatattacggcctttttaaagaccgtaaagaaaaataagcacaagttttatccggcctttattcacattcttgcccgcctgatgaatgctcatccggagttccgtatggcaatgaaagacggtgagctggtgatatgggatagtgttcacccttgttacaccgttttccatgagcaaactgaaacgttttcatcgctctggagtgaataccacgacgatttccggcagtttctacacatatattcgcaagatgtggcgtgttacggtgaaaacctggcctatttccctaaagggtttattgagaatatgtttttcgtctcagccaatccctgggtgagtttcaccagttttgatttaaacgtggccaatatggacaacttcttcgcccccgttttcactatgggcaaatattatacgcaaggcgacaaggtgctgatgccgctggcgattcaggttcatcatgccgtttgtgatggcttccatgtcggcagaatgcttaatgaattacaacagtactgcgatgagtggcagggcggggcgtaatttttttaaggcagttattggtgcccttctagagtccttactgcagtagttttgctgaaatactcgattcacaaaaatatcaacttatggttgttttgtgagatatcaatatatggttgttttgtggttaagttgctgattataaataattattaaatatcactttatggttgcatcaacaggtaccgagctcgaattcactggccgtcgttttacaacgtcgtgactgggaaaaccctggcgttacccaacttaatcgccttgcggccagtttgctcaggctctccccgtggaggtaataattgacgatatgatcatttattctgcctcccagagcctgataaaaacggtgaatccgttagcgaggtgccgccggcttccattcaggtcgaggtggcccggctccatgcaccgcgacgcaacgcggggaggcagacaaggtatagggcggcgaggcggctacagccgatagtctggaacagcgcacttacgggttgctgcgcaacccaagtgctaccggcgcggcagcgtgacccgtgtcggcggctccaacggctcgccatcgtccagaaaacacggctcatcgggcatcggcaggcgctgctgcccgcgccgttcccattcctccgtttcggtcaaggctggcaggtctggttccatgcccggaatgccgggctggctgggcggctcctcgccggggccggtcggtagttgctgctcgcccggatacagggtcgggatgcggcgcaggtcgccatgccccaacagcgattcgtcctggtcgtcgtgatcaaccaccacggcggcactgaacaccgacaggcgcaactggtcgcggggctggccccacgccacgcggtcattgaccacgtaggccgacacggtgccggggccgttgagcttcacgacggagatccagcgctcggccaccaagtccttgactgcgtattggaccgtccgcaaagaacgtccgatgagcttggaaagtgtcttctggctgaccaccacggcgttctggtggcccatctgcgccacgaggtgatgcagcagcattg

SEQ ID NO: 96 - DNA, 7794 bp, artificial sequence
  Synthetic
gacgaaagggcctcgtgatacgcctatttttataggttaatgtcatgataataatggtttcttagacgtcaggtggcacttttcggggaaatgtgcgcggaacccctatttgtttatttttctaaatacattcaaatatgtatccgctcatgagacaataaccctgataaatgcttcaataatattgaaaaaggaagagtatgagtattcaacatttccgtgtcgcccttattcccttttttgcggcattttgccttcctgtttttgctcacccagaaacgctggtgaaagtaaaagatgctgaagatcagttgggtgcacgagtgggttacatcgaactggatctcaacagcggtaagatccttgagagttttcgccccgaagaacgttttccaatgatgagcacttttaaagttctgctatgtggcgcggtattatcccgtattgacgccgggcaagagcaactcggtcgccgcatacactattctcagaatgacttggttgagtactcaccagtcacagaaaagcatcttacggatggcatgacagtaagagaattatgcagtgctgccataaccatgagtgataacactgcggccaacttacttctgacaacgatcggaggaccgaaggagctaaccgcttttttgcacaacatgggggatcatgtaactcgccttgatcgttgggaaccggagctgaatgaagccataccaaacgacgagcgtgacaccacgatgcctgtagcaatggcaacaacgttgcgcaaactattaactggcgaactacttactctagcttcccggcaacaattaatagactggatggaggcggataaagttgcaggaccacttctgcgctcggcccttccggctggctggtttattgctgataaatctggagccggtgagcgtggctctcgcggtatcattgcagcactggggccagatggtaagccctcccgtatcgtagttatctacacgacggggagtcaggcaactatggatgaacgaaatagacagatcgctgagataggtgcctcactgattaagcattggtaactgtcagaccaagtttactcatatatactttagattgatttaaaacttcatttttaatttaaaaggatctaggtgaagatcctttttgataatctcatgaccaaaatcccttaacgtgagttttcgttccactgagcgtcagaccccgtagaaaagatcaaaggatcttcttgagatcctttttttctgcgcgtaatctgctgcttgcaaacaaaaaaaccaccgctaccagcggtggtttgtttgccggatcaagagctaccaactctttttccgaaggtaactggcttcagcagagcgcagataccaaatactgttcttctagtgtagccgtagttaggccaccacttcaagaactctgtagcaccgcctacatacctcgctctgctaatcctgttaccagtggctgctgccagtggcgataagtcgtgtcttaccgggttggactcaagacgatagttaccggataaggcgcagcggtcgggctgaacggggggttcgtgcacacagcccagcttggagcgaacgacctacaccgaactgagatacctacagcgtgagctatgagaaagcgccacgcttcccgaagggagaaaggcggacaggtatccggtaagcggcagggtcggaacaggagagcgcacgagggagcttccagggggaaacgcctggtatctttatagtcctgtcgggtttcgccacctctgacttgagcgtcgatttttgtgatgctcgtcaggggggcggagcctatggaaaaacgccagcaacgcggcctttttacggttcctggccttttgctggccttttgctcacatgttctttcctgcgttatcccctgattctgtggataaccgtattaccgcctttgagtgagctgataccgctcgccgcagccgaactaccgagcgcagcgagtcagtgagcgaggaagcggaagagcgcccaatacgcaaaccgcctctccccgcgcgttggccgattcattaatgcagcccaagctttgttggaacaaccataaaatgataattacacccataaattgataattatcacacccataaattgatattgcctcttcatggtctaaacttcagtaagtttacgacattttcctcgaggtcatttccggggtacagctcgtccatgccgagagtgatcccggcggcggtcacgaactccagcaggaccatgtgatcgcgcttctcgttggggtctttgctcagggcggactgggtgctcaggtagtggttgtcgggcagcagcacggggccgtcgccgatgggggtgttctgctggtagtggtcggcgagctgcacgctgccgtcctcgatgttgtggcggatcttgaagttcaccttgatgccgttcttctgcttgtcggccatgatatagacgttgtggctgttgtagttgtactccagcttgtgccccaggatgttgccgtcctccttgaagtcgatgcccttcagctcgatgcggttcaccagggtgtcgccctcgaacttcacctcggcgcgggtcttgtagttgccgtcgtccttgaagaagatggtgcgctcctggacgtagccttcgggcatggcggacttgaagaagtcgtgctgcttcatgtggtcggggtagcggctgaagcactgcacgccgtaggtcagggtggtcacgagggtgggccagggcacgggcagcttgccggtggtgcagatgaacttcagggtcagcttgccgtaggtggcatcgccctcgccctcgccggacacgctgaacttgtggccgtttacgtcgccgtccagctcgaccaggatgggcaccaccccggtgaacagctcctcgcccttgctcactgggccaggattctcctcgacgtcaccgcatgttagcagacttcctctgccctctccactgccgaattcctttttcttttttgcctggccggcctttttcgtggccgccggccttttgtcgcctcccagctgagacaggtcgatccgtgtctcgtacaggccggtgatgctctggtggatcagggtggcgtccagcacctctttggtgctggtgtacctcttccggtcgatggtggtgtcaaagtacttgaaggcggcaggggctcccagattggtcagggtaaacaggtggatgatattctcggcctgctctctgatgggcttatcccggtgcttgttgtaggcggacagcactttgtccagattagcgtcggccaggatcactctcttggagaactcgctgatctgctcgatgatctcgtccaggtagtgcttgtgctgttccacaaacagctgtttctgctcattatcctcgggggagcccttcagcttctcatagtggctggccaggtacaggaagttcacatatttggagggcagggccagttcgtttcccttctgcagttcgccggcagaggccagcattctcttccggccgttttccagctcgaacagggagtacttaggcagcttgatgatcaggtcctttttcacttctttgtagcccttggcttccagaaagtcgatgggattcttctcgaagctgcttctttccatgatggtgatccccagcagctctttcacactcttcagtttcttggacttgcccttttccactttggccaccaccagcacagaataggccacggtggggctgtcgaagccgccgtacttcttagggtcccagtccttctttctggcgatcagcttatcgctgttcctcttgggcaggatagactctttgctgaagccgcctgtctgcacctcggtctttttcacgatattcacttggggcatgctcagcactttccgcacggtggcaaaatcccggcccttatcccacacgatctccccggtttcgccgtttgtctcgatcagaggccgcttccggatctcgccgttggccagggtaatctcggtcttgaaaaagttcatgatgttgctgtagaagaagtacttggcggtagccttgccgatttcctgctcgctcttggcgatcatcttccgcacgtcgtacaccttgtagtcgccgtacacgaactcgctttccagcttagggtactttttgatcagggcggttcccacgacggcgttcaggtaggcgtcgtgggcgtggtggtagttgttgatctcgcgcactttgtaaaactggaaatccttccggaaatcggacaccagcttggacttcagggtgatcactttcacttcccggatcagcttgtcattctcgtcgtacttagtgttcatccgggagtccaggatctgtgccacgtgctttgtgatctgccgggtttccaccagctgtctcttgatgaagccggccttatccagttcgctcaggccgcctctctcggccttggtcagattgtcgaactttctctgggtaatcagcttggcgttcagcagctgccgccagtagttcttcatcttcttcacgacctcttcggagggcacgttgtcgctcttgccccggttcttgtcgcttctggtcagcaccttgttgtcgatggagtcgtccttcagaaagctctgaggcacgatatggtccacatcgtagtcggacagccggttgatgtccagttcctggtccacgtacatatcccgcccattctgcaggtagtacaggtacagcttctcgttctgcagctgggtgttttccacggggtgttctttcaggatctggctgcccagctctttgatgccctcttcgatccgcttcattctctcgcggctgttcttctgtcccttctgggtggtctggttctctctggccatttcgatcacgatgttctcgggcttgtgccggcccatcactttcacgagctcgtccaccaccttcactgtctgcaggatgcccttcttaatggcggggctgccggccagattggcaatgtgctcgtgcaggctatcgccctggccggacacctgggctttctggatgtcctctttaaaggtcaggctgtcgtcgtggatcagctgcatgaagtttctgttggcgaagccgtcggacttcaggaaatccaggattgtcttgccggactgcttgtcccggatgccgttgatcagcttccggctcagcctgccccagccggtgtatctccgccgcttcagctgcttcatcactttgtcgtcgaacaggtgggcataggttttcagccgttcctcgatcatctctctgtcctcaaacagtgtcagggtcagcacgatatcttccagaatgtcctcgttttcctcattgtccaggaagtccttgtccttgataattttcagcagatcgtggtatgtgcccagggaggcgttgaaccgatcttccacgccggagatttccacggagtcgaagcactcgattttcttgaagtagtcctctttcagctgcttcacggtcactttccggttggtcttgaacagcaggtccacgatggcctttttctgctcgccgctcaggaaggcgggctttctcattccctcggtcacgtatttcactttggtcagctcgttatacacggtgaagtactcgtacagcaggctgtgcttgggcagcaccttctcgttgggcaggttcttatcgaagttggtcatccgctcgatgaagctctgggcggaagcgcccttgtccaccacttcctcgaagttccagggggtgatggtttcctcgctctttctggtcatccaggcgaatctgctgtttcccctggccagagggcccacgtagtaggggatgcggaaggtcaggatcttctcgatcttttcccggttgtccttcaggaatgggtaaaaatcttcctgccgccgcagaatggcgtgcagctctcccaggtggatctggtgggggatgctgccgttgtcgaaggtccgctgcttccgcagcaggtcctctctgttcagcttcacgagcagttcctcggtgccgtccatcttttccaggatgggcttgatgaacttgtagaactcttcctggctggctccgccgtcaatgtagccggcgtagccgttcttgctctggtcgaagaaaatctctttgtacttctcaggcagctgctgccgcacgagagctttcagcagggtcaggtcctggtggtgctcgtcgtatctcttgatcatagaggcgctcaggggggccttggtgatctcggtgttcactctcaggatgtcgctcagcaggatggcgtcggacaggttcttggcggccagaaacaggtcggcgtactggtcgccgatctgggccagcaggttgtccaggtcgtcgtcgtaggtgtccttgctcagctgcagtttggcatcctcggccaggtcgaagttgctcttgaagttgggggtcaggcccaggctcagggcaatcaggtttccgaacaggccattcttcttctcgccgggcagctgggcgatcagattttccagccgtctgctcttgctcagtctggcagacaggatggccttggcgtccacgccgctggcgttgatggggttttcctcgaacagctggttgtaggtctgcaccagctggatgaacagcttgtccacgtcgctgttgtcggggttcaggtcgccctcgatcaggaagtggccccggaacttgatcatgtgggccagggccagatagatcagccgcaggtcggccttgtcggtgctgtccaccagtttctttctcaggtggtagatggtggggtacttctcgtggtaggccacctcgtccacgatgttgccgaagatggggtgccgctcgtgcttcttatcctcttccaccaggaaggactcttccagtctgtggaagaagctgtcgtccaccttggccatctcgttgctgaagatctcttgcagatagcagatccggttcttccgtctggtgtatcttcttctggcggttctcttcagccgggtggcctcggctgtttcgccgctgtcgaacagcagggctccgatcaggttcttcttgatgctgtgccggtcggtgttgcccagcaccttgaatttcttgctgggcaccttgtactcgtcggtgatcacggcccagcccacagagttggtgccgatgtccaggccgatgctgtacttcttgtcggctgctgggactccgtggataccgaccttccgcttcttctttggggccatcttatcgtcatcgtctttgtaatcaatatcatgatccttgtagtctccgtcgtggtccagtccttactgcagtagttttgctgaaatactcgattcacaaaaatatcaacttatggttgttttgtgagatatcaatatatggttgttttgtggttaagttgctgattataaataattattaaatatcactttatggttgcatcaacaggtaccgagctcgaattcactggccgtcgttttacaacgtcgtgactgggaaaaccctggcgttacccaacttaatcgccttgcagcacatccccctttcgccagctggcgtaatagcgaagaggcccgcaccgatcgcccttcccaacagttgcgcagcctgaatggcgaatggcgcctgatgcggtattttctccttacgcatctgtgcggtatttcacaccgcatatggtgcactctcagtacaatctgctctgatgccgcatagttaagccagccccgacacccgccaacacccgctgacgcgccctgacgggcttgtctgctcccggcatccgcttacagacaagctgtgaccgtctccgggagctgcatgtgtcagaggttttcaccgtcatcaccgaaacgcgcga

SEQ ID NO: 97 - DNA, 12612 bp, artificial sequence
  Synthetic
gacgaaagggcctcgtgatacgcctatttttataggttaatgtcatgataataatggtttcttagacgtcaggtggcacttttcggggaaatgtgcgcggaacccctatttgtttatttttctaaatacattcaaatatgtatccgctcatgagacaataaccctgataaatgcttcaataatattgaaaaaggaagagtatgagtattcaacatttccgtgtcgcccttattcccttttttgcggcattttgccttcctgtttttgctcacccagaaacgctggtgaaagtaaaagatgctgaagatcagttgggtgcacgagtgggttacatcgaactggatctcaacagcggtaagatccttgagagttttcgccccgaagaacgttttccaatgatgagcacttttaaagttctgctatgtggcgcggtattatcccgtattgacgccgggcaagagcaactcggtcgccgcatacactattctcagaatgacttggttgagtactcaccagtcacagaaaagcatcttacggatggcatgacagtaagagaattatgcagtgctgccataaccatgagtgataacactgcggccaacttacttctgacaacgatcggaggaccgaaggagctaaccgcttttttgcacaacatgggggatcatgtaactcgccttgatcgttgggaaccggagctgaatgaagccataccaaacgacgagcgtgacaccacgatgcctgtagcaatggcaacaacgttgcgcaaactattaactggcgaactacttactctagcttcccggcaacaattaatagactggatggaggcggataaagttgcaggaccacttctgcgctcggcccttccggctggctggtttattgctgataaatctggagccggtgagcgtggctctcgcggtatcattgcagcactggggccagatggtaagccctcccgtatcgtagttatctacacgacggggagtcaggcaactatggatgaacgaaatagacagatcgctgagataggtgcctcactgattaagcattggtaactgtcagaccaagtttactcatatatactttagattgatttaaaacttcatttttaatttaaaaggatctaggtgaagatcctttttgataatctcatgaccaaaatcccttaacgtgagttttcgttccactgagcgtcagaccccgtagaaaagatcaaaggatcttcttgagatcctttttttctgcgcgtaatctgctgcttgcaaacaaaaaaaccaccgctaccagcggtggtttgtttgccggatcaagagctaccaactctttttccgaaggtaactggcttcagcagagcgcagataccaaatactgttcttctagtgtagccgtagttaggccaccacttcaagaactctgtagcaccgcctacatacctcgctctgctaatcctgttaccagtggctgctgccagtggcgataagtcgtgtcttaccgggttggactcaagacgatagttaccggataaggcgcagcggtcgggctgaacggggggttcgtgcacacagcccagcttggagcgaacgacctacaccgaactgagatacctacagcgtgagctatgagaaagcgccacgcttcccgaagggagaaaggcggacaggtatccggtaagcggcagggtcggaacaggagagcgcacgagggagcttccagggggaaacgcctggtatctttatagtcctgtcgggtttcgccacctctgacttgagcgtcgatttttgtgatgctcgtcaggggggcggagcctatggaaaaacgccagcaacgcggcctttttacggttcctggccttttgctggccttttgctcacatgttctttcctgcgttatcccctgattctgtggataaccgtattaccgcctttgagtgagctgataccgctcgccgcagccgaactaccgagcgcagcgagtcagtgagcgaggaagcggaagagcgcccaatacgcaaaccgcctctccccgcgcgttggccgattcattaatgcagcccaagctttgttggaacaaccataaaatgataattacacccataaattgataattatcacacccataaattgatattgcctcttcatggtctaaacttcagtaagtttacgacattttcctcgaggtcatttccggggtacagctcgtccatgccgagagtgatcccggcggcggtcacgaactccagcaggaccatgtgatcgcgcttctcgttggggtctttgctcagggcggactgggtgctcaggtagtggttgtcgggcagcagcacggggccgtcgccgatgggggtgttctgctggtagtggtcggcgagctgcacgctgccgtcctcgatgttgtggcggatcttgaagttcaccttgatgccgttcttctgcttgtcggccatgatatagacgttgtggctgttgtagttgtactccagcttgtgccccaggatgttgccgtcctccttgaagtcgatgcccttcagctcgatgcggttcaccagggtgtcgccctcgaacttcacctcggcgcgggtcttgtagttgccgtcgtccttgaagaagatggtgcgctcctggacgtagccttcgggcatggcggacttgaagaagtcgtgctgcttcatgtggtcggggtagcggctgaagcactgcacgccgtaggtcagggtggtcacgagggtgggccagggcacgggcagcttgccggtggtgcagatgaacttcagggtcagcttgccgtaggtggcatcgccctcgccctcgccggacacgctgaacttgtggccgtttacgtcgccgtccagctcgaccaggatgggcaccaccccggtgaacagctcctcgcccttgctcactgggccaggattctcctcgacgtcaccgcatgttagcagacttcctctgccctctccactgccgaattcctttttcttttttgcctggccggcctttttcgtggccgccggccttttgtcgcctcccagctgagacaggtcgatccgtgtctcgtacaggccggtgatgctctggtggatcagggtggcgtccagcacctctttggtgctggtgtacctcttccggtcgatggtggtgtcaaagtacttgaaggcggcaggggctcccagattggtcagggtaaacaggtggatgatattctcggcctgctctctgatgggcttatcccggtgcttgttgtaggcggacagcactttgtccagattagcgtcggccaggatcactctcttggagaactcgctgatctgctcgatgatctcgtccaggtagtgcttgtgctgttccacaaacagctgtttctgctcattatcctcgggggagcccttcagcttctcatagtggctggccaggtacaggaagttcacatatttggagggcagggccagttcgtttcccttctgcagttcgccggcagaggccagcattctcttccggccgttttccagctcgaacagggagtacttaggcagcttgatgatcaggtcctttttcacttctttgtagcccttggcttccagaaagtcgatgggattcttctcgaagctgcttctttccatgatggtgatccccagcagctctttcacactcttcagtttcttggacttgcccttttccactttggccaccaccagcacagaataggccacggtggggctgtcgaagccgccgtacttcttagggtcccagtccttctttctggcgatcagcttatcgctgttcctcttgggcaggatagactctttgctgaagccgcctgtctgcacctcggtctttttcacgatattcacttggggcatgctcagcactttccgcacggtggcaaaatcccggcccttatcccacacgatctccccggtttcgccgtttgtctcgatcagaggccgcttccggatctcgccgttggccagggtaatctcggtcttgaaaaagttcatgatgttgctgtagaagaagtacttggcggtagccttgccgatttcctgctcgctcttggcgatcatcttccgcacgtcgtacaccttgtagtcgccgtacacgaactcgctttccagcttagggtactttttgatcagggcggttcccacgacggcgttcaggtaggcgtcgtgggcgtggtggtagttgttgatctcgcgcactttgtaaaactggaaatccttccggaaatcggacaccagcttggacttcagggtgatcactttcacttcccggatcagcttgtcattctcgtcgtacttagtgttcatccgggagtccaggatctgtgccacagccctcccacacataaccagagggcagcaattcacgaatcccaactgccgtcggctgtccatcactgtccttcactatggctttgatcccaggatgcagatcgagaagcacctgtcggcaccgtccgcaggggctcaagatgcccctgttctcatttccgatcgcgacgatacaagtcaggttgccagctgccgcagcagcagcagtgcccagcaccacgagttctgcacaaggtcccccagtaaaatgatatacattgacaccagtgaagatgcggccgtcgctagagagagctgcgctggcgacgctgtagtcttcagagatggggatgctgttgattgtagccgttgctctttcaatgagggtggattcttcttgagacaaaggcttggccatcggtccaggattctcttcgacatctccggcttgtttcagcagagagaagtttgttgcgccggatccggcatagtcggggacatcatatgggtatgcataatcaggcacgtcgtagggataagcgtaatctggaacatcgtatgggtatttcttcttcttagcctgtccagccttctttgtggcggcaggtcgcttggatcccttgtacagctcatccataccgagagtgatgcctgcggcagtcacaaattccagaaggaccatgtgatctctcttttcgtttgggtccttggaaagctttgattgcgtggagagataatgattgtcaggcaagagtacaggtccatctccgatgggcgtattttgttggtaatgatcagccagttgaacactaccatcttcgacattatgtcggatcttaaagttggcctttatcccatttttctgcttatcagcggtaatatacacattatggctgttaaagttgtactccaacttgtgccccagtatgttaccgtcctccttaaaatcaatacctttcagttcaattcgattaaccagagtgtccccttcaaatttaacctcggctcgggttttatatgtaccatcatccttaaagctgatggtcctttcttgaacataaccttcaggcattgcagacttgaaaaagtcatgctgtttcatgtggtcgggatatcgagaaaagcattgcacgccgtaggtgagggtcgttacgagtgtaggccatgggacgggcagtttgcccgtcgtacagatgaatttcagagtcagcttaccattcgtggcgtccccttcgccttcgcccctgacggagaatttatgtccatttacatctccatcaagctctaccagaatgggcactactccagtgaagagttcttcacctttactcacgctacctcctcctccgcttcctcctcctccgcttccacctcctccttccagggccttgtactcgaacatgactttcacgagttcgcacagttcctcgctgttccggtcggtcatcagtttctttttcttcagattcttcaggtgcacgatcttctctgattccagggtctggatttcgatcttcttgtcagcgccgatcttgaaggtggccacgaagccgtattctttcagaatgtccacgatggacttcatgatggcgttcttcagcttccggtcgtaggacagcagcttccgcaggttttccagcacttccagcaggctaatctcggcgtgggggatgtagttgaagtgggcaatgtagttccggatgtacaggtcctttttttcctgcttcagtttcttcactttcttgtcggagtagatgctccgcttttccacattgtccttgtacagttctttgtagaagttgatatacttttccacgatctggccgcttttgtacttcacattcttggagttgtcgaaattgaaaatttcctcgatgtagtggttctcgggaaactcgcccttcagccggaatctcaggtcccgctcccagatgctggtgtagcccacgagccggtgcaggatcttcagcagcaggccctgcagcaggttcagctcattgaattccaccttgttcttcaggtgggtgtacttctggatgttgccgatggccttctcatactctttgtagtcctcgtcgttgaacttttcgtccttcttgggtctggcgtacttccggtgcaggttctgctgcatggtgtagttcttttcaatctcattcttcttgttgctgtactctttcagttctttcaggctgatcttatacttggccttatcggcgatcttttccagcagattcagcatgccgtatttcttgatattgtagaaggcccggtgcttgatgatgttctcgccgtcgaaatagatcttgttggtgtcgaactttttcagctctttccggtccttgattttgttttcgttgaagtccaggaacttgccgatctcgttggcttccagctcgaagtcctcggtcactctgttgttgtccaggttcagcaggttgatcagttccaactcgtcgctgaaggtttcttctttgttggcggactggtacttttccaggctgcccttcaggttggtcagctctttgtggttcagcagcttcaggatcaggtaaaacatgttcagattctcggtgtacttcagaatcttccccagcttgatctcgcgcacgaactcattgatctcgtgagggatttctttgttccgattgtgcttctcatagttcttcaggatcttgtcgtacttctctttgttatcctttttgatcttgatcttggagaagatgtcgttgttgtcattgttgttgttgctctcgatatacttcagattgttcttgttcaggtagtcgatgaagcccttcaggaaaatctgctgaataaagtcgatgtaggtattcttttcctctttgtcctggttgttgatcatctctctgctctggatgatggccaggtattccacgggcacggttttctcgatgttctcgaacttctgatacttgtagtggccggttttctggttccgctgcttgttaatcttgatcacttcattggtgatcttaaagaacaccttggagtttttcacgaacttgttcaggaactcgccgtagtagatattcttcagcaggtagatctgggcgtccttctcttctttgtccttgggcacgctccaaaaaaacttcagggtattccgcaggtcctcaatcttgttgtacagcttggtgaagctgggcacgaaggggatgtttttgttcacgaagttgaacttggtattcttcaggtacttgatgatcacatccttctcgtagtagttgaacacgttggcgctgttcagctgcttgaagattttcagcttcagcttcttttcgttgatttcgttctgaaacatcttcttggagatctcgctgggggcgatattcttgaaggcgaagatgtccttgccttccagttccaggttgaagtgcacgatgccgtgtctgatgctgctgatggcctcgtcgatgttggcgaagaagtcctcgatctcgttcttgttgtccatgttgaagtcgtagctgtagaacatcttcagattttctttcacttcgttctgcttgttctcattgtagatcttgtccacctcgccggacacgtatttctcttcgcccttgttgttcttcacggtcttgccccgcatccggccggtgataccgttctcgttctcggtttccaggatgttcctcaggctgaagtaggccacgctggacacgccgatgatgtttctcaggaaggcctcgttctgccggttccgggcgataaagtcggaggtggcgatctcgcccacttgcagatagtagttgtacttgccgcagttccgcacgtaggtgtccagcttgttcagcagtttgttttcgatcagctttttcagattctggtactcgaagatccgcttgatcttatcgttgctgatgttgctcagccgcttgtacacgtagtttttcagcagctgggacatctcgatttccacgaagtggcagaaggcgtacttaatattcttgtcgttcagttcctctttgtccaggtagtacttgtagaacacctggcttttcttcagctcagacatgtcggggatcttctcaatcagctctttgatgttgttcacgttctggatctcttcgtagataatcttggcgaagttctctttgtcgttcttccggccgatgatcttgtgatagtactcgcggatcttgtacttctcgtgcttcttgctgttctcgatcaggaaaaacagtttctcgatatcctctttcttatacagcttgtcgaaggcttcctgcacgttgttgatgtagtcgttgcgcttggcgctctctctgtagtagtcgtagatgatgttccgcttgctcttgccgcccactttttccacgttgttctcgttgatcttctggtagttggccttgttctcttcgaagctgtacttcaggctgttgatcttgttcagcttggcttccacgtccttccgaaagatttccagttcctcagagttcacgtcctcgttcagcaggatcttcttcagcacggagaagctgttcttgtttttcaggtcgtactcgctgatgtcctcttcgctatagttcttgtcctgcacggcgttcttttctttccggttcttcagatacagcacgctgtccttcaggtgcagcaccttgttgctaaagaacttcttcaggttctctcttctgatccggttctcttcctcggaggcgttgtcggggttcttgatgtagatgtccagccggatgctcagcagctcgctcagtctctcgctggtccggttttcctcgctggtggacttcacgagcttgccctcttcgatgtacttcttgtggctgatgccgtcgaccttggtcactttcatggatcgtgctttgtgatctgccgggtttccaccagctgtctcttgatgaagccggccttatccagttcgctcaggccgcctctctcggccttggtcagattgtcgaactttctctgggtaatcagcttggcgttcagcagctgccgccagtagttcttcatcttcttcacgacctcttcggagggcacgttgtcgctcttgccccggttcttgtcgcttctggtcagcaccttgttgtcgatggagtcgtccttcagaaagctctgaggcacgatatggtccacatcgtagtcggacagccggttgatgtccagttcctggtccacgtacatatcccgcccattctgcaggtagtacaggtacagcttctcgttctgcagctgggtgttttccacggggtgttctttcaggatctggctgcccagctctttgatgccctcttcgatccgcttcattctctcgcggctgttcttctgtcccttctgggtggtctggttctctctggccatttcgatcacgatgttctcgggcttgtgccggcccatcactttcacgagctcgtccaccaccttcactgtctgcaggatgcccttcttaatggcggggctgccggccagattggcaatgtgctcgtgcaggctatcgccctggccggacacctgggctttctggatgtcctctttaaaggtcaggctgtcgtcgtggatcagctgcatgaagtttctgttggcgaagccgtcggacttcaggaaatccaggattgtcttgccggactgcttgtcccggatgccgttgatcagcttccggctcagcctgccccagccggtgtatctccgccgcttcagctgcttcatcactttgtcgtcgaacaggtgggcataggttttcagccgttcctcgatcatctctctgtcctcaaacagtgtcagggtcagcacgatatcttccagaatgtcctcgttttcctcattgtccaggaagtccttgtccttgataattttcagcagatcgtggtatgtgcccagggaggcgttgaaccgatcttccacgccggagatttccacggagtcgaagcactcgattttcttgaagtagtcctctttcagctgcttcacggtcactttccggttggtcttgaacagcaggtccacgatggcctttttctgctcgccgctcaggaaggcgggctttctcattccctcggtcacgtatttcactttggtcagctcgttatacacggtgaagtactcgtacagcaggctgtgcttgggcagcaccttctcgttgggcaggttcttatcgaagttggtcatccgctcgatgaagctctgggcggaagcgcccttgtccaccacttcctcgaagttccagggggtgatggtttcctcgctctttctggtcatccaggcgaatctgctgtttcccctggccagagggcccacgtagtaggggatgcggaaggtcaggatcttctcgatcttttcccggttgtccttcaggaatgggtaaaaatcttcctgccgccgcagaatggcgtgcagctctcccaggtggatctggtgggggatgctgccgttgtcgaaggtccgctgcttccgcagcaggtcctctctgttcagcttcacgagcagttcctcggtgccgtccatcttttccaggatgggcttgatgaacttgtagaactcttcctggctggctccgccgtcaatgtagccggcgtagccgttcttgctctggtcgaagaaaatctctttgtacttctcaggcagctgctgccgcacgagagctttcagcagggtcaggtcctggtggtgctcgtcgtatctcttgatcatagaggcgctcaggggggccttggtgatctcggtgttcactctcaggatgtcgctcagcaggatggcgtcggacaggttcttggcggccagaaacaggtcggcgtactggtcgccgatctgggccagcaggttgtccaggtcgtcgtcgtaggtgtccttgctcagctgcagtttggcatcctcggccaggtcgaagttgctcttgaagttgggggtcaggcccaggctcagggcaatcaggtttccgaacaggccattcttcttctcgccgggcagctgggcgatcagattttccagccgtctgctcttgctcagtctggcagacaggatggccttggcgtccacgccgctggcgttgatggggttttcctcgaacagctggttgtaggtctgcaccagctggatgaacagcttgtccacgtcgctgttgtcggggttcaggtcgccctcgatcaggaagtggccccggaacttgatcatgtgggccagggccagatagatcagccgcaggtcggccttgtcggtgctgtccaccagtttctttctcaggtggtagatggtggggtacttctcgtggtaggccacctcgtccacgatgttgccgaagatggggtgccgctcgtgcttcttatcctcttccaccaggaaggactcttccagtctgtggaagaagctgtcgtccaccttggccatctcgttgctgaagatctcttgcagatagcagatccggttcttccgtctggtgtatcttcttctggcggttctcttcagccgggtggcctcggctgtttcgccgctgtcgaacagcagggctccgatcaggttcttcttgatgctgtgccggtcggtgttgcccagcaccttgaatttcttgctgggcaccttgtactcgtcggtgatcacggcccagcccacagagttggtgccgatgtccaggccgatgctgtacttcttgtcggctgctgggactccgtggataccgaccttccgcttcttctttggggccatcttatcgtcatcgtctttgtaatcaatatcatgatccttgtagtctccgtcgtggtccagtccttactgcagtagttttgctgaaatactcgattcacaaaaatatcaacttatggttgttttgtgagatatcaatatatggttgttttgtggttaagttgctgattataaataattattaaatatcactttatggttgcatcaacaggtaccgagctcgaattcactggccgtcgttttacaacgtcgtgactgggaaaaccctggcgttacccaacttaatcgccttgcagcacatccccctttcgccagctggcgtaatagcgaagaggcccgcaccgatcgcccttcccaacagttgcgcagcctgaatggcgaatggcgcctgatgcggtattttctccttacgcatctgtgcggtatttcacaccgcatatggtgcactctcagtacaatctgctctgatgccgcatagttaagccagccccgacacccgccaacacccgctgacgcgccctgacgggcttgtctgctcccggcatccgcttacagacaagctgtgaccgtctccgggagctgcatgtgtcagaggttttcaccgtcatcaccgaaacgcgcga

SEQ ID NO: 98 - DNA, 14088 bp, artificial sequence
  Synthetic
ccgccgtgggtttcctcgcaataagcccggcccacgcctcatgcgctttgcgttccgtttgcacccagtgaccgggcttgttcttggcttgaatgccgatttctctggactgcgtggccatgcttatctccatgcggtaggggtgccgcacggttgcggcaccatgcgcaatcagctgcaacttttcggcagcgcgacaacaattatgcgttgcgtaaaagtggcagtcaattacagattttctttaacctacgcaatgagctattgcggggggtgccgcaatgagctgttgcgtaccccccttttttaagttgttgatttttaagtctttcgcatttcgccctatatctagttctttggtgcccaaagaagggcacccctgcggggttcccccacgccttcggcgcggctccccctccggcaaaaagtggcccctccggggcttgttgatcgactgcgcggccttcggccttgcccaaggtggcgctgcccccttggaacccccgcactcgccgccgtgaggctcggggggcaggcgggcgggcttcgcccttcgactgcccccactcgcataggcttgggtcgttccaggcgcgtcaaggccaagccgctgcgcggtcgctgcgcgagccttgacccgccttccacttggtgtccaaccggcaagcgaagcgcgcaggccgcaggccggaggcttttccccagagaaaattaaaaaaattgatggggcaaggccgcaggccgcgcagttggagccggtgggtatgtggtcgaaggctgggtagccggtgggcaatccctgtggtcaagctcgtgggcaggcgcagcctgtccatcagcttgtccagcagggttgtccacgggccgagcgaagcgagccagccggtggccgctcgcggccatcgtccacatatccacgggctggcaagggagcgcagcgaccgcgcagggcgaagcccggagagcaagcccgtagggcgccgcagccgccgtaggcggtcacgactttgcgaagcaaagtctagtgagtatactcaagcattgagtggcccgccggaggcaccgccttgcgctgcccccgtcgagccggttggacaccaaaagggaggggcaggcatggcggcatacgcgatcatgcgatgcaagaagctggcgaaaatgggcaacgtggcggccagtctcaagcacgcctaccgcgagcgcgagacgcccaacgctgacgccagcaggacgccagagaacgagcactgggcggccagcagcaccgatgaagcgatgggccgactgcgcgagttgctgccagagaagcggcgcaaggacgctgtgttggcggtcgagtacgtcatgacggccagcccggaatggtggaagtcggccagccaagaacagcaggcggcgttcttcgagaaggcgcacaagtggctggcggacaagtacggggcggatcgcatcgtgacggccagcatccaccgtgacgaaaccagcccgcacatgaccgcgttcgtggtgccgctgacgcaggacggcaggctgtcggccaaggagttcatcggcaacaaagcgcagatgacccgcgaccagaccacgtttgcggccgctgtggccgatctagggctgcaacggggcatcgagggcagcaaggcacgtcacacgcgcattcaggcgttctacgaggccctggagcggccaccagtgggccacgtcaccatcagcccgcaagcggtcgagccacgcgcctatgcaccgcagggattggccgaaaagctgggaatctcaaagcgcgttgagacgccggaagccgtggccgaccggctgacaaaagcggttcggcaggggtatgagcctgccctacaggccgccgcaggagcgcgtgagatgcgcaagaaggccgatcaagcccaagagacggcccgtgaccttcgggagcgcctgaagcccgttctggacgccctggggccgttgaatcgggatatgcaggccaaggccgccgcgatcatcaaggccgtgggcgaaaagctgctgacggaacagcgggaagtccagcgccagaaacaggcccagcgccagcaggaacgcgggcgcgcacatttccccgaaaagtgccacctgggatgaatgtcagctactgggctatctggacaagggaaaacgcaagcgcaaagagaaagcaggtagcttgcagtgggcttacatggcgatagctagactgggcggttttatggacagcaagcgaaccggaattgccagctggggcgccctctggtaaggttgggaagccctgcaaagtaaactggatggctttcttgccgccaaggatctgatggcgcaggggatcaagatctgatcaagagacaggatgaggatcgtttcgcatgattgaacaagatggattgcacgcaggttctccggccgcttgggtggagaggctattcggctatgactgggcacaacagacaatcggctgctctgatgccgccgtgttccggctgtcagcgcaggggcgcccggttctttttgtcaagaccgacctgtccggtgccctgaatgaactgcaagacgaggcagcgcggctatcgtggctggccacgacgggcgttccttgcgcagctgtgctcgacgttgtcactgaagcgggaagggactggctgctattgggcgaagtgccggggcaggatctcctgtcatctcaccttgctcctgccgagaaagtatccatcatggctgatgcaatgcggcggctgcatacgcttgatccggctacctgcccattcgaccaccaagcgaaacatcgcatcgagcgagcacgtactcggatggaagccggtcttgtcgatcaggatgatctggacgaagagcatcaggggctcgcgccagccgaactgttcgccaggctcaaggcgcgcatgcccgacggcgaggatctcgtcgtgacccatggcgatgcctgcttgccgaatatcatggtggaaaatggccgcttttctggattcatcgactgtggccggctgggtgtggcggaccgctatcaggacatagcgttggctacccgtgatattgctgaagagcttggcggcgaatgggctgaccgcttcctcgtgctttacggtatcgccgctcccgattcgcagcgcatcgccttctatcgccttcttgacgagttcttctgagcgggactctggggttcgaaatgaccgaccaagcgacgcccaacctgccatcacgagatttcgattccaccgccgccttctatgaaaggttgggcttcggaatcgttttccgggacgccggctggatgatcctccagcgcggggatctcatgctggagttcttcgcccacccccatgggcaaatattatacgcaaggcgacaaggtgctgatgccgctggcgattcaggttcatcatgccgtttgtgatggcttccatgtcggcagaatgcttaatgaattacaacagtttttatgcatgcgcccaatacgcaaaccgcctctccccgcgcgttggccgattcattaatgcagctggcacgacaggtttcccgactggtggataaccgtattaccgcctttgagtgagctgataccgctcgccgcagccgaacgaccgagcgcagcgagtcagtgagcgaggacacaagctttgacagctagctcagtcctaggtataatactagcgtcgacgtggagatataccatgggtgaactgccgagtaggtagctgataacagtacagcgcggctgaaatcatcattaaagcggtgaactgccgagtaggtagctgataacgcattactaagctggcgcgtgaagctgtagaagtgaactgccgagtaggtagctgataacggatccgaattcgagcgaaggagatatacatatgtttttgcaaagacctaaaccttacagcgatgaaagtttagaaagtttctttatccgagtggctaacaaaaatggctacggtgatgtccatcgcttcctagaagccactaaacgattccttcaagacattgaccataatggctatcaaacctttccgactgatataactcggataaacccatactcagctaaaaacagttccagcgcacgaactgcgtcattcctgaaacttgcacaattgacatttaatgaaccgccagagctacttgggttggcaattaacagaacaaacatgaaatactcgccgtcaactagcgcggttgttagaggtgcagaagtctttcctcgcagtttactacggacgcactccatcccctgctgtcctttgtgtctgcgagaaaatggctacgcctcctacctttggcactttcaggggtacgaatactgccacagccataacgtacctttaattaccacttgtagctgtggtaaggagtttgactaccgagtatctgggttaaagggcatttgctgcaaatgcaaggagcctatcaccttaaccagcagggagaacggtcatgaggcagcgtgtactgtttcaaactggcttgctggccatgaatctaaacctctgccaaatcttcctaaaagctaccgatggggtttagttcattggtggatgggtattaaagatagcgagttcgatcacttttcgttcgttcaatttttctcaaactggccaaggtcattccactcgataatcgaagatgaagtagagttcaaccttgagcatgctgttgtcagcacgtctgaattacgactaaaagatcttcttggtcgattgtttttcggttcaattcggttacctgagcggaatcttcaacacaatatcatccttggtgagcttctctgctatttagaaaatcgtttatggcaagacaagggattaatcgccaacctcaaaatgaacgcgttagaggcgactgtaatgttaaattgtagcctcgatcagattgcatcaatggttgaacaacgcatcttgaagccaaatcgaaaaagcaagcccaacagccctcttgatgttaccgattatctatttcatttcggcgatattttctgtctttggttagctgagttccaaagcgatgagtttaaccgttcgttttatgtgtcgaggtggtaaatgcaaactctgaaagaactaatcgcatccaatcctgacgacttaacaactgaacttaagagagcatttcgtccactcacaccgcatattgcaattgatggtaatgaacttgacgcactgacgatattagtcaatttaaccgataagactgatgatcagaaagacctgctcgatcgagccaaatgcaagcaaaaacttcgagatgaaaaatggtgggctagctgcataaattgcgttaattacagacaaagccataacccaaaattcccggatatacgttctgaaggcgtgattcgaacccaagccctgggtgaattaccgagtttcctactctcgtcctcaaaaatcccaccataccattggtcatatagccatgattcaaaatacgtcaacaaaagcgcattcctcaccaatgagttttgttgggatggtgagatctcatgtttgggtgagcttcttaaagatgcagatcacccactttggaatactttgaaaaagttaggttgttctcaaaaaacttgcaaagcaatggcaaaacaactagctgatattactctcacgactatcaatgtcacactcgcaccaaattacctgactcaaatatctctccccgatagtgatacatcctacatttcactctctcctgttgcatcgctatcgatgcaaagccactttcatcagaggctccaagatgaaaatcggcatagcgcgataacgcggtttagccgaactaccaacatgggggtcactgcgatgacatgtggcggcgcatttagaatgttaaagtctggcgctaagttttccagcccccctcatcaccgattaaacagtaaacgaagttggttgacgtcagagcatgttcagtcattaaaacagtaccagcgcctcaacaaaagcctcatacctgaaaactctcggattgcactccgtagaaaatacaaaatcgagcttcaaaatatggtcagatcttggtttgcaatgcaagaccatacccttgattcgaacatacttatccaacatttgaatcatgacctatcttacttaggagccacaaaacgttttgcatacgatccagcgatgaccaagctctttactgagcttttgaaacgagagttatcaaattcaatcaataatggtgagcaacacactaatggatcgtttttagtcctaccgaatatcagggtttgtggcgcaacagctttaagctccccggtaacggtggggattccatcacttacagctttctttggcttcgttcacgcatttgaacggaatataaatcgcaccacctcatcgtttcgtgttgaatcctttgcgatatgcgtccatcaactacatgtcgagaagcgaggtttgacagcagagtttgtggaaaaaggcgacgggactatatccgctcccgcgacccgggatgactggcagtgtgatgtcgtatttagccttattttgaacaccaactttgctcaacatattgaccaagatacgttagttacatcactaccaaagcgattggctcggggttcagcaaaaattgcgattgatgactttaaacatatcaactcattctcgacattagaaacagcgatcgaatctctgccaatagaagctggtaggtggttatcactttacgcacagtcaaacaataatctaagtgatctattagcagccatgacagaggaccatcagctcatggcaagctgcgtcggttaccacttgttagaagagcccaaagataaaccaaactccctcagaggttacaaacacgctatcgccgagtgcatcattggactcattaactcaatcacctttagctcagagactgatcccaacacaatcttttggtcgctaaagaactatcaaaactacctagtggtacagccaaggagtatcaacgatgaaactaccgacaaatctagcctatgagcgctctatcgacccatcagatgtctgtttttttgtcgtctggcccgatgatagaaaaacacctttaacctacaattctcgtactctgctcgggcaaatggaagcggcatcattagcctatgatgtctcaggtcaaccaataaaaagtgccaccgctgaggcgttagctcaagggaaccctcatcaagttgatttctgccacgttccatacggtgcgagtcatattgaatgcagtttctccgtctcgttttcttctgaactacgtcaaccatataagtgtaactcaagcaaagttaaacaaacgctagtgcaattagtcgagctctacgaaacgaaaatcggctggactgagctagcaacccgatatttgatgaacatttgcaacggtaaatggctgtggaaaaatacccgtaaagcctattgctggaacattgtacttacaccttggccttggaacggggaaaaggttggatttgaagatattcgtactaactacacctcacggcaagactttaaaaataataaaaattggtctgctatagttgaaatgatcaaaaccgcattttctagtactgatgggctggcgatatttgaagtcagggccaccttgcacttgccaacgaatgctatggtgcggccaagccaagttttcacagaaaaagaaagtggcagtaaaagtaaatctaaaactcaaaacagtcgagtttttcagagtacaactattgatggtgaacgatcgccaatactaggggcctttaaaacgggagcagctattgcaaccattgacgactggtatcctgaagccactgagccactaagggtcggacggtttggggttcatcgcgaagatgtcacttgctaccgtcatccgtctaccggaaaagattttttctcgatattacaacaagcagagcactatattgaagtgttgagcgccaacaaaactcccgctcaagaaactatcaacgacatgcactttttaatggctaacctgattaagggtgggatgttccagcataaaggagactgactgtgaaatggtattataagacaatcacctttctgccagagttgtgcaacaacgagtcactggctgcaaagtgtctccgcgttctgcatggatttaactatcagtatgagacacgaaatatcggcgtttcatttccgctttggtgtgatgcaacggttggaaaaaagatttcatttgtcagcaagaacaagatagaactcgacttactacttaaacaacactatttcgtccaaatggaacaacttcaatactttcatatatccaacactgttctcgtcccagaagattgtacatacgtttcctttagacgctgtcaatctatagataagctcacagcagcagggctggcaaggaaaatcagacgcctggagaaacgtgctctatctagaggcgagcaatttgacccatcatcttttgctcaaaaagagcatactgcaatagcgcactaccactcacttggggagtccagcaaacagacgaaccgcaactttcgactcaatatcaggatgctctcggagcaaccccgtgaggggaactcgatttttagtagctatggcttatcaaattcagaaaactcgtttcagcctgtacccttaatctgacctttaataaggagatataccatggcgacaagtttacctacgccctcagcaattacgacttcggcgttagagtatgcattccatactcccgctcgcaatctaacgaaatctcgcggaaaaaacattcatcgttatgtcagtgtaaagatgagtaagaggattacggtagaatctactctagagtgtgatgcctgctatcactttgattttgagccaagtattgttcgcttttgcgctcaaccgattcgatttttatattatctcaatggtcagtctcactcctatgttcctgactttctagttcaatttgataccaacgagtttgttctatatgaagtaaagtcagcttatgctaagaacaaacctgattttgatgttgaatgggaggcgaaagtaaaagcagcaactgaactagggctagaattggagcttgttgaagagagtgatattagggatacggttgtattaaataatcttaagcgcatgcatcgttatgcttcgaaagatgagctgaataacgtacataactctctcttaaaaataataaagtacaatggcgcccaatctgcaagatgcttgggagaacagttgggtttaaaaggccgaactgttttaccaattttgtgcgatttgctgtcaaggtgtttactcgatacacgtttggataagcctctatctcttgaatctcgatttgagttggccagttatggctaagaaagggttctcaagtttccatagaaaagcagtctcttcccaagatacgcttgaatcgatagagcttgtctctagcgctaattgtctagaaagtgttacgtatcaagatatatcagcatttcccgaaacaattgcggtagagattaatttccgattaagcattcttcgctttttagcgcgaaagtgcgaaaccattgtggccaaatcaattgaaccacatcgtgtagagctacagcaaaactatagtagaaaaatacccagtgcaataacgatatatcgatggtggcttgcttttcgaaaatcagactacaaccccattagcttagcacctaatatcaaggatagaggtaatagagagacaaaagtgtcaacagttgttgattctattatggaacaggcagttgaaagagttatatctggacgaaaagtcaatgttagctctgcatataaacgtgttcgacgaaaagttcgtcaatacaatctaactcatggaacgaaatacacgtatcctaagtacgaatctgtaagaaagcgagtaaaaaagaaaaccccatttgagttattagccgcagggaaaggggagagagtagctaagagagagtttcgccgaatgggaaaaaagatcctcacgtctagcgtgctagagagggttgaaatagatcacactgtcgttgacctttttgcagtacacgaagagtatcgaatcccattgggccgaccttggcttactcaattggttgattgttacagtaaagctgtaatcggtttttatttaggtttcgagcctcctagctatgtgtcggtttcccttgcacttaagaatgcaatacaacgcaaagatgacttaatctcctcgtatgaatcgatcgagaatgaatggctatgttatggcatcccagacctactcgtaactgataatggtaaagagtttttgtcgaaagcatttgatcaagcatgtgaatcactattgatcaatgtgcatcaaaataaagttgagacgcccgacaacaaacctcatgttgaacgtaactacgggactattaatacttctctgttagacgatttacctgggaaatccttcagccagtaccttcaaagagaagggtacgactctgtgggagaagctacccttacactcaatgagattagagaaatttacttaatttggttggtggatatttatcataaaaaacccaatcagagaggcactaattgtcctaatgttgcgtggaaaaagggttgtcaagaatgggaaccagaggagttctctggttctaaagacgaattagactttaaatttgctattgttgattacaaacaacttactaaagtagggataactgtctacaaagaactgagttatagcaatgaccgtttagctgaatatagagggaagaaaggaaaccataaagttcagttcaagtataaccctgagtgtatggcagttatttgggtgttggatgaggatatgaatgagtactttacagttaatgcgattgactacgaatatgcaagtagagtatcactttggcaacataaatataacatgaaatatcaagcagaactaaattcagcagaatatgatgaggacaaggaaattgatgcagaaataaaaattgaagaaatcgcagatcgttcaattgttaagactaacaaaatcagagctcggaggcgtggcgctaggcatcaagagaatagcgcaagggctaagtcaatcagtaatgcgaacccggcctcgatacaaaaacatgaagatgaaatcgttagtgcagataatgacgattgggatattgattatgtctgagaaatcgtcaaatgagtgaaacgcgtgaggctcgtatatcaagagctaaaagggcatttgtatccacaccgagcgttaggaaaatcttgagttacatggatagatgtagagatctatcagacctagagtctgagcctacatgcatgatggtctatggtgcttcgggtgtaggtaaaacgaccgtcatcaagaaatacttaaatcaaaacagaagagagtccgaagccgggggcgatataataccggttttgcatattgagttgccagacaatgcgaagccagtagatgcagcaagggaattgctggttgaaatgggtgacccgctagcactttatgaaactgacttagctagattgacgaaaagactgactgaattaatccctgcggtcggcgtgaagctgattattatcgatgagttccaacatttggtggaagaaaggtcaaatcgggttcttacccaagtaggtaattggctaaaaatgatacttaacaaaacgaaatgtccaattgttatatttggtatgccatactcaaaagttgtactgcaagcaaactcgcaacttcacgggcgattttccattcaggttgaactgcgcccctttagctaccagggaggtagaggtgtatttaaaacttttttggaataccttgataaagccctaccttttgaaaaacaggctggcttagccaacgaaagtttgcagaaaaaattgtatgcattctctcagggaaacatgcgttcgttgagaaaccttatttatcaagcatctatcgaagcaattgataatcagcatgagacgataaccgaagaagatttcgtttttgcatcgaagttgacatcgggcgataaacccaactcatggaaaaatccttttgaggagggtgttgaggtaacagaagatatgttacgaccgccaccaaaagatattggttgggaggactatttgagacattcaaccccgagagtgagtaaaccaggtagaaataaaaactttttcgaataacctaggctgctgcgctgctgccaccgctgagcaataactagcataaccccttggggcctctaaacgggtcttgaggggttttttgctgaaacctcaggcatgttggaacaaccataaaatgataattacacccataaattgataattatcacacccataaattgatattgcctcttcatggtctaaacttcagtaagtttacgacattttcatgaagaggtcatttccggggatccatggagaaaaaaatcactggatataccaccgttgatatatcccaatggcatcgtaaagaacattttgaggcatttcagtcagttgctcaatgtacctataaccagaccgttcagctggatattacggcctttttaaagaccgtaaagaaaaataagcacaagttttatccggcctttattcacattcttgcccgcctgatgaatgctcatccggagttccgtatggcaatgaaagacggtgagctggtgatatgggatagtgttcacccttgttacaccgttttccatgagcaaactgaaacgttttcatcgctctggagtgaataccacgacgatttccggcagtttctacacatatattcgcaagatgtggcgtgttacggtgaaaacctggcctatttccctaaagggtttattgagaatatgtttttcgtctcagccaatccctgggtgagtttcaccagttttgatttaaacgtggccaatatggacaacttcttcgcccccgttttcactatgggcaaatattatacgcaaggcgacaaggtgctgatgccgctggcgattcaggttcatcatgccgtttgtgatggcttccatgtcggcagaatgcttaatgaattacaacagtactgcgatgagtggcagggcggggcgtaatttttttaaggcagttattggtgcccttctagagtccttactgcagtagttttgctgaaatactcgattcacaaaaatatcaacttatggttgttttgtgagatatcaatatatggttgttttgtggttaagttgctgattataaataattattaaatatcactttatggttgcatcaacaggtaccgagctcgaattcactggccgtcgttttacaacgtcgtgactgggaaaaccctggcgttacccaacttaatcgccttgcggccagtttgctcaggctctccccgtggaggtaataattgacgatatgatcatttattctgcctcccagagcctgataaaaacggtgaatccgttagcgaggtgccgccggcttccattcaggtcgaggtggcccggctccatgcaccgcgacgcaacgcggggaggcagacaaggtatagggcggcgaggcggctacagccgatagtctggaacagcgcacttacgggttgctgcgcaacccaagtgctaccggcgcggcagcgtgacccgtgtcggcggctccaacggctcgccatcgtccagaaaacacggctcatcgggcatcggcaggcgctgctgcccgcgccgttcccattcctccgtttcggtcaaggctggcaggtctggttccatgcccggaatgccgggctggctgggcggctcctcgccggggccggtcggtagttgctgctcgcccggatacagggtcgggatgcggcgcaggtcgccatgccccaacagcgattcgtcctggtcgtcgtgatcaaccaccacggcggcactgaacaccgacaggcgcaactggtcgcggggctggccccacgccacgcggtcattgaccacgtaggccgacacggtgccggggccgttgagcttcacgacggagatccagcgctcggccaccaagtccttgactgcgtattggaccgtccgcaaagaacgtccgatgagcttggaaagtgtcttctggctgaccaccacggcgttctggtggcccatctgcgccacgaggtgatgcagcagcattg

SEQ ID NO: 99 - DNA, 14155 bp, artificial sequence
  Synthetic
ccgccgtgggtttcctcgcaataagcccggcccacgcctcatgcgctttgcgttccgtttgcacccagtgaccgggcttgttcttggcttgaatgccgatttctctggactgcgtggccatgcttatctccatgcggtaggggtgccgcacggttgcggcaccatgcgcaatcagctgcaacttttcggcagcgcgacaacaattatgcgttgcgtaaaagtggcagtcaattacagattttctttaacctacgcaatgagctattgcggggggtgccgcaatgagctgttgcgtaccccccttttttaagttgttgatttttaagtctttcgcatttcgccctatatctagttctttggtgcccaaagaagggcacccctgcggggttcccccacgccttcggcgcggctccccctccggcaaaaagtggcccctccggggcttgttgatcgactgcgcggccttcggccttgcccaaggtggcgctgcccccttggaacccccgcactcgccgccgtgaggctcggggggcaggcgggcgggcttcgcccttcgactgcccccactcgcataggcttgggtcgttccaggcgcgtcaaggccaagccgctgcgcggtcgctgcgcgagccttgacccgccttccacttggtgtccaaccggcaagcgaagcgcgcaggccgcaggccggaggcttttccccagagaaaattaaaaaaattgatggggcaaggccgcaggccgcgcagttggagccggtgggtatgtggtcgaaggctgggtagccggtgggcaatccctgtggtcaagctcgtgggcaggcgcagcctgtccatcagcttgtccagcagggttgtccacgggccgagcgaagcgagccagccggtggccgctcgcggccatcgtccacatatccacgggctggcaagggagcgcagcgaccgcgcagggcgaagcccggagagcaagcccgtagggcgccgcagccgccgtaggcggtcacgactttgcgaagcaaagtctagtgagtatactcaagcattgagtggcccgccggaggcaccgccttgcgctgcccccgtcgagccggttggacaccaaaagggaggggcaggcatggcggcatacgcgatcatgcgatgcaagaagctggcgaaaatgggcaacgtggcggccagtctcaagcacgcctaccgcgagcgcgagacgcccaacgctgacgccagcaggacgccagagaacgagcactgggcggccagcagcaccgatgaagcgatgggccgactgcgcgagttgctgccagagaagcggcgcaaggacgctgtgttggcggtcgagtacgtcatgacggccagcccggaatggtggaagtcggccagccaagaacagcaggcggcgttcttcgagaaggcgcacaagtggctggcggacaagtacggggcggatcgcatcgtgacggccagcatccaccgtgacgaaaccagcccgcacatgaccgcgttcgtggtgccgctgacgcaggacggcaggctgtcggccaaggagttcatcggcaacaaagcgcagatgacccgcgaccagaccacgtttgcggccgctgtggccgatctagggctgcaacggggcatcgagggcagcaaggcacgtcacacgcgcattcaggcgttctacgaggccctggagcggccaccagtgggccacgtcaccatcagcccgcaagcggtcgagccacgcgcctatgcaccgcagggattggccgaaaagctgggaatctcaaagcgcgttgagacgccggaagccgtggccgaccggctgacaaaagcggttcggcaggggtatgagcctgccctacaggccgccgcaggagcgcgtgagatgcgcaagaaggccgatcaagcccaagagacggcccgtgaccttcgggagcgcctgaagcccgttctggacgccctggggccgttgaatcgggatatgcaggccaaggccgccgcgatcatcaaggccgtgggcgaaaagctgctgacggaacagcgggaagtccagcgccagaaacaggcccagcgccagcaggaacgcgggcgcgcacatttccccgaaaagtgccacctgggatgaatgtcagctactgggctatctggacaagggaaaacgcaagcgcaaagagaaagcaggtagcttgcagtgggcttacatggcgatagctagactgggcggttttatggacagcaagcgaaccggaattgccagctggggcgccctctggtaaggttgggaagccctgcaaagtaaactggatggctttcttgccgccaaggatctgatggcgcaggggatcaagatctgatcaagagacaggatgaggatcgtttcgcatgattgaacaagatggattgcacgcaggttctccggccgcttgggtggagaggctattcggctatgactgggcacaacagacaatcggctgctctgatgccgccgtgttccggctgtcagcgcaggggcgcccggttctttttgtcaagaccgacctgtccggtgccctgaatgaactgcaagacgaggcagcgcggctatcgtggctggccacgacgggcgttccttgcgcagctgtgctcgacgttgtcactgaagcgggaagggactggctgctattgggcgaagtgccggggcaggatctcctgtcatctcaccttgctcctgccgagaaagtatccatcatggctgatgcaatgcggcggctgcatacgcttgatccggctacctgcccattcgaccaccaagcgaaacatcgcatcgagcgagcacgtactcggatggaagccggtcttgtcgatcaggatgatctggacgaagagcatcaggggctcgcgccagccgaactgttcgccaggctcaaggcgcgcatgcccgacggcgaggatctcgtcgtgacccatggcgatgcctgcttgccgaatatcatggtggaaaatggccgcttttctggattcatcgactgtggccggctgggtgtggcggaccgctatcaggacatagcgttggctacccgtgatattgctgaagagcttggcggcgaatgggctgaccgcttcctcgtgctttacggtatcgccgctcccgattcgcagcgcatcgccttctatcgccttcttgacgagttcttctgagcgggactctggggttcgaaatgaccgaccaagcgacgcccaacctgccatcacgagatttcgattccaccgccgccttctatgaaaggttgggcttcggaatcgttttccgggacgccggctggatgatcctccagcgcggggatctcatgctggagttcttcgcccacccccatgggcaaatattatacgcaaggcgacaaggtgctgatgccgctggcgattcaggttcatcatgccgtttgtgatggcttccatgtcggcagaatgcttaatgaattacaacagtttttatgcatgcgcccaatacgcaaaccgcctctccccgcgcgttggccgattcattaatgcagctggcacgacaggtttcccgactggtggataaccgtattaccgcctttgagtgagctgataccgctcgccgcagccgaacgaccgagcgcagcgagtcagtgagcgaggacacaagctttgacagctagctcagtcctaggtataatactagcgtcgacctttaataaggagatataccatgggtgaactgccgagtaggtagctgataacgcattactaagctggcgcgtgaagctgtagaagtgaactgccgagtaggtagctgataactgggaggattcataaagcattgtttgttggctgtgaactgccgagtaggtagctgataacagtacagcgcggctgaaatcatcattaaagcggtgaactgccgagtaggtagctgataacggatccgaattcgagcgaaggagatatacatatgtttttgcaaagacctaaaccttacagcgatgaaagtttagaaagtttctttatccgagtggctaacaaaaatggctacggtgatgtccatcgcttcctagaagccactaaacgattccttcaagacattgaccataatggctatcaaacctttccgactgatataactcggataaacccatactcagctaaaaacagttccagcgcacgaactgcgtcattcctgaaacttgcacaattgacatttaatgaaccgccagagctacttgggttggcaattaacagaacaaacatgaaatactcgccgtcaactagcgcggttgttagaggtgcagaagtctttcctcgcagtttactacggacgcactccatcccctgctgtcctttgtgtctgcgagaaaatggctacgcctcctacctttggcactttcaggggtacgaatactgccacagccataacgtacctttaattaccacttgtagctgtggtaaggagtttgactaccgagtatctgggttaaagggcatttgctgcaaatgcaaggagcctatcaccttaaccagcagggagaacggtcatgaggcagcgtgtactgtttcaaactggcttgctggccatgaatctaaacctctgccaaatcttcctaaaagctaccgatggggtttagttcattggtggatgggtattaaagatagcgagttcgatcacttttcgttcgttcaatttttctcaaactggccaaggtcattccactcgataatcgaagatgaagtagagttcaaccttgagcatgctgttgtcagcacgtctgaattacgactaaaagatcttcttggtcgattgtttttcggttcaattcggttacctgagcggaatcttcaacacaatatcatccttggtgagcttctctgctatttagaaaatcgtttatggcaagacaagggattaatcgccaacctcaaaatgaacgcgttagaggcgactgtaatgttaaattgtagcctcgatcagattgcatcaatggttgaacaacgcatcttgaagccaaatcgaaaaagcaagcccaacagccctcttgatgttaccgattatctatttcatttcggcgatattttctgtctttggttagctgagttccaaagcgatgagtttaaccgttcgttttatgtgtcgaggtggtaaatgcaaactctgaaagaactaatcgcatccaatcctgacgacttaacaactgaacttaagagagcatttcgtccactcacaccgcatattgcaattgatggtaatgaacttgacgcactgacgatattagtcaatttaaccgataagactgatgatcagaaagacctgctcgatcgagccaaatgcaagcaaaaacttcgagatgaaaaatggtgggctagctgcataaattgcgttaattacagacaaagccataacccaaaattcccggatatacgttctgaaggcgtgattcgaacccaagccctgggtgaattaccgagtttcctactctcgtcctcaaaaatcccaccataccattggtcatatagccatgattcaaaatacgtcaacaaaagcgcattcctcaccaatgagttttgttgggatggtgagatctcatgtttgggtgagcttcttaaagatgcagatcacccactttggaatactttgaaaaagttaggttgttctcaaaaaacttgcaaagcaatggcaaaacaactagctgatattactctcacgactatcaatgtcacactcgcaccaaattacctgactcaaatatctctccccgatagtgatacatcctacatttcactctctcctgttgcatcgctatcgatgcaaagccactttcatcagaggctccaagatgaaaatcggcatagcgcgataacgcggtttagccgaactaccaacatgggggtcactgcgatgacatgtggcggcgcatttagaatgttaaagtctggcgctaagttttccagcccccctcatcaccgattaaacagtaaacgaagttggttgacgtcagagcatgttcagtcattaaaacagtaccagcgcctcaacaaaagcctcatacctgaaaactctcggattgcactccgtagaaaatacaaaatcgagcttcaaaatatggtcagatcttggtttgcaatgcaagaccatacccttgattcgaacatacttatccaacatttgaatcatgacctatcttacttaggagccacaaaacgttttgcatacgatccagcgatgaccaagctctttactgagcttttgaaacgagagttatcaaattcaatcaataatggtgagcaacacactaatggatcgtttttagtcctaccgaatatcagggtttgtggcgcaacagctttaagctccccggtaacggtggggattccatcacttacagctttctttggcttcgttcacgcatttgaacggaatataaatcgcaccacctcatcgtttcgtgttgaatcctttgcgatatgcgtccatcaactacatgtcgagaagcgaggtttgacagcagagtttgtggaaaaaggcgacgggactatatccgctcccgcgacccgggatgactggcagtgtgatgtcgtatttagccttattttgaacaccaactttgctcaacatattgaccaagatacgttagttacatcactaccaaagcgattggctcggggttcagcaaaaattgcgattgatgactttaaacatatcaactcattctcgacattagaaacagcgatcgaatctctgccaatagaagctggtaggtggttatcactttacgcacagtcaaacaataatctaagtgatctattagcagccatgacagaggaccatcagctcatggcaagctgcgtcggttaccacttgttagaagagcccaaagataaaccaaactccctcagaggttacaaacacgctatcgccgagtgcatcattggactcattaactcaatcacctttagctcagagactgatcccaacacaatcttttggtcgctaaagaactatcaaaactacctagtggtacagccaaggagtatcaacgatgaaactaccgacaaatctagcctatgagcgctctatcgacccatcagatgtctgtttttttgtcgtctggcccgatgatagaaaaacacctttaacctacaattctcgtactctgctcgggcaaatggaagcggcatcattagcctatgatgtctcaggtcaaccaataaaaagtgccaccgctgaggcgttagctcaagggaaccctcatcaagttgatttctgccacgttccatacggtgcgagtcatattgaatgcagtttctccgtctcgttttcttctgaactacgtcaaccatataagtgtaactcaagcaaagttaaacaaacgctagtgcaattagtcgagctctacgaaacgaaaatcggctggactgagctagcaacccgatatttgatgaacatttgcaacggtaaatggctgtggaaaaatacccgtaaagcctattgctggaacattgtacttacaccttggccttggaacggggaaaaggttggatttgaagatattcgtactaactacacctcacggcaagactttaaaaataataaaaattggtctgctatagttgaaatgatcaaaaccgcattttctagtactgatgggctggcgatatttgaagtcagggccaccttgcacttgccaacgaatgctatggtgcggccaagccaagttttcacagaaaaagaaagtggcagtaaaagtaaatctaaaactcaaaacagtcgagtttttcagagtacaactattgatggtgaacgatcgccaatactaggggcctttaaaacgggagcagctattgcaaccattgacgactggtatcctgaagccactgagccactaagggtcggacggtttggggttcatcgcgaagatgtcacttgctaccgtcatccgtctaccggaaaagattttttctcgatattacaacaagcagagcactatattgaagtgttgagcgccaacaaaactcccgctcaagaaactatcaacgacatgcactttttaatggctaacctgattaagggtgggatgttccagcataaaggagactgactgtgaaatggtattataagacaatcacctttctgccagagttgtgcaacaacgagtcactggctgcaaagtgtctccgcgttctgcatggatttaactatcagtatgagacacgaaatatcggcgtttcatttccgctttggtgtgatgcaacggttggaaaaaagatttcatttgtcagcaagaacaagatagaactcgacttactacttaaacaacactatttcgtccaaatggaacaacttcaatactttcatatatccaacactgttctcgtcccagaagattgtacatacgtttcctttagacgctgtcaatctatagataagctcacagcagcagggctggcaaggaaaatcagacgcctggagaaacgtgctctatctagaggcgagcaatttgacccatcatcttttgctcaaaaagagcatactgcaatagcgcactaccactcacttggggagtccagcaaacagacgaaccgcaactttcgactcaatatcaggatgctctcggagcaaccccgtgaggggaactcgatttttagtagctatggcttatcaaattcagaaaactcgtttcagcctgtacccttaatctgacctttaataaggagatataccatggcgacaagtttacctacgccctcagcaattacgacttcggcgttagagtatgcattccatactcccgctcgcaatctaacgaaatctcgcggaaaaaacattcatcgttatgtcagtgtaaagatgagtaagaggattacggtagaatctactctagagtgtgatgcctgctatcactttgattttgagccaagtattgttcgcttttgcgctcaaccgattcgatttttatattatctcaatggtcagtctcactcctatgttcctgactttctagttcaatttgataccaacgagtttgttctatatgaagtaaagtcagcttatgctaagaacaaacctgattttgatgttgaatgggaggcgaaagtaaaagcagcaactgaactagggctagaattggagcttgttgaagagagtgatattagggatacggttgtattaaataatcttaagcgcatgcatcgttatgcttcgaaagatgagctgaataacgtacataactctctcttaaaaataataaagtacaatggcgcccaatctgcaagatgcttgggagaacagttgggtttaaaaggccgaactgttttaccaattttgtgcgatttgctgtcaaggtgtttactcgatacacgtttggataagcctctatctcttgaatctcgatttgagttggccagttatggctaagaaagggttctcaagtttccatagaaaagcagtctcttcccaagatacgcttgaatcgatagagcttgtctctagcgctaattgtctagaaagtgttacgtatcaagatatatcagcatttcccgaaacaattgcggtagagattaatttccgattaagcattcttcgctttttagcgcgaaagtgcgaaaccattgtggccaaatcaattgaaccacatcgtgtagagctacagcaaaactatagtagaaaaatacccagtgcaataacgatatatcgatggtggcttgcttttcgaaaatcagactacaaccccattagcttagcacctaatatcaaggatagaggtaatagagagacaaaagtgtcaacagttgttgattctattatggaacaggcagttgaaagagttatatctggacgaaaagtcaatgttagctctgcatataaacgtgttcgacgaaaagttcgtcaatacaatctaactcatggaacgaaatacacgtatcctaagtacgaatctgtaagaaagcgagtaaaaaagaaaaccccatttgagttattagccgcagggaaaggggagagagtagctaagagagagtttcgccgaatgggaaaaaagatcctcacgtctagcgtgctagagagggttgaaatagatcacactgtcgttgacctttttgcagtacacgaagagtatcgaatcccattgggccgaccttggcttactcaattggttgattgttacagtaaagctgtaatcggtttttatttaggtttcgagcctcctagctatgtgtcggtttcccttgcacttaagaatgcaatacaacgcaaagatgacttaatctcctcgtatgaatcgatcgagaatgaatggctatgttatggcatcccagacctactcgtaactgataatggtaaagagtttttgtcgaaagcatttgatcaagcatgtgaatcactattgatcaatgtgcatcaaaataaagttgagacgcccgacaacaaacctcatgttgaacgtaactacgggactattaatacttctctgttagacgatttacctgggaaatccttcagccagtaccttcaaagagaagggtacgactctgtgggagaagctacccttacactcaatgagattagagaaatttacttaatttggttggtggatatttatcataaaaaacccaatcagagaggcactaattgtcctaatgttgcgtggaaaaagggttgtcaagaatgggaaccagaggagttctctggttctaaagacgaattagactttaaatttgctattgttgattacaaacaacttactaaagtagggataactgtctacaaagaactgagttatagcaatgaccgtttagctgaatatagagggaagaaaggaaaccataaagttcagttcaagtataaccctgagtgtatggcagttatttgggtgttggatgaggatatgaatgagtactttacagttaatgcgattgactacgaatatgcaagtagagtatcactttggcaacataaatataacatgaaatatcaagcagaactaaattcagcagaatatgatgaggacaaggaaattgatgcagaaataaaaattgaagaaatcgcagatcgttcaattgttaagactaacaaaatcagagctcggaggcgtggcgctaggcatcaagagaatagcgcaagggctaagtcaatcagtaatgcgaacccggcctcgatacaaaaacatgaagatgaaatcgttagtgcagataatgacgattgggatattgattatgtctgagaaatcgtcaaatgagtgaaacgcgtgaggctcgtatatcaagagctaaaagggcatttgtatccacaccgagcgttaggaaaatcttgagttacatggatagatgtagagatctatcagacctagagtctgagcctacatgcatgatggtctatggtgcttcgggtgtaggtaaaacgaccgtcatcaagaaatacttaaatcaaaacagaagagagtccgaagccgggggcgatataataccggttttgcatattgagttgccagacaatgcgaagccagtagatgcagcaagggaattgctggttgaaatgggtgacccgctagcactttatgaaactgacttagctagattgacgaaaagactgactgaattaatccctgcggtcggcgtgaagctgattattatcgatgagttccaacatttggtggaagaaaggtcaaatcgggttcttacccaagtaggtaattggctaaaaatgatacttaacaaaacgaaatgtccaattgttatatttggtatgccatactcaaaagttgtactgcaagcaaactcgcaacttcacgggcgattttccattcaggttgaactgcgcccctttagctaccagggaggtagaggtgtatttaaaacttttttggaataccttgataaagccctaccttttgaaaaacaggctggcttagccaacgaaagtttgcagaaaaaattgtatgcattctctcagggaaacatgcgttcgttgagaaaccttatttatcaagcatctatcgaagcaattgataatcagcatgagacgataaccgaagaagatttcgtttttgcatcgaagttgacatcgggcgataaacccaactcatggaaaaatccttttgaggagggtgttgaggtaacagaagatatgttacgaccgccaccaaaagatattggttgggaggactatttgagacattcaaccccgagagtgagtaaaccaggtagaaataaaaactttttcgaataacctaggctgctgcgctgctgccaccgctgagcaataactagcataaccccttggggcctctaaacgggtcttgaggggttttttgctgaaacctcaggcatgttggaacaaccataaaatgataattacacccataaattgataattatcacacccataaattgatattgcctcttcatggtctaaacttcagtaagtttacgacattttcatgaagaggtcatttccggggatccatggagaaaaaaatcactggatataccaccgttgatatatcccaatggcatcgtaaagaacattttgaggcatttcagtcagttgctcaatgtacctataaccagaccgttcagctggatattacggcctttttaaagaccgtaaagaaaaataagcacaagttttatccggcctttattcacattcttgcccgcctgatgaatgctcatccggagttccgtatggcaatgaaagacggtgagctggtgatatgggatagtgttcacccttgttacaccgttttccatgagcaaactgaaacgttttcatcgctctggagtgaataccacgacgatttccggcagtttctacacatatattcgcaagatgtggcgtgttacggtgaaaacctggcctatttccctaaagggtttattgagaatatgtttttcgtctcagccaatccctgggtgagtttcaccagttttgatttaaacgtggccaatatggacaacttcttcgcccccgttttcactatgggcaaatattatacgcaaggcgacaaggtgctgatgccgctggcgattcaggttcatcatgccgtttgtgatggcttccatgtcggcagaatgcttaatgaattacaacagtactgcgatgagtggcagggcggggcgtaatttttttaaggcagttattggtgcccttctagagtccttactgcagtagttttgctgaaatactcgattcacaaaaatatcaacttatggttgttttgtgagatatcaatatatggttgttttgtggttaagttgctgattataaataattattaaatatcactttatggttgcatcaacaggtaccgagctcgaattcactggccgtcgttttacaacgtcgtgactgggaaaaccctggcgttacccaacttaatcgccttgcggccagtttgctcaggctctccccgtggaggtaataattgacgatatgatcatttattctgcctcccagagcctgataaaaacggtgaatccgttagcgaggtgccgccggcttccattcaggtcgaggtggcccggctccatgcaccgcgacgcaacgcggggaggcagacaaggtatagggcggcgaggcggctacagccgatagtctggaacagcgcacttacgggttgctgcgcaacccaagtgctaccggcgcggcagcgtgacccgtgtcggcggctccaacggctcgccatcgtccagaaaacacggctcatcgggcatcggcaggcgctgctgcccgcgccgttcccattcctccgtttcggtcaaggctggcaggtctggttccatgcccggaatgccgggctggctgggcggctcctcgccggggccggtcggtagttgctgctcgcccggatacagggtcgggatgcggcgcaggtcgccatgccccaacagcgattcgtcctggtcgtcgtgatcaaccaccacggcggcactgaacaccgacaggcgcaactggtcgcggggctggccccacgccacgcggtcattgaccacgtaggccgacacggtgccggggccgttgagcttcacgacggagatccagcgctcggccaccaagtccttgactgcgtattggaccgtccgcaaagaacgtccgatgagcttggaaagtgtcttctggctgaccaccacggcgttctggtggcccatctgcgccacgaggtgatgcagcagcattg

SEQ ID NO: 100 - DNA, 14028 bp, artificial sequence
  Synthetic
ccgccgtgggtttcctcgcaataagcccggcccacgcctcatgcgctttgcgttccgtttgcacccagtgaccgggcttgttcttggcttgaatgccgatttctctggactgcgtggccatgcttatctccatgcggtaggggtgccgcacggttgcggcaccatgcgcaatcagctgcaacttttcggcagcgcgacaacaattatgcgttgcgtaaaagtggcagtcaattacagattttctttaacctacgcaatgagctattgcggggggtgccgcaatgagctgttgcgtaccccccttttttaagttgttgatttttaagtctttcgcatttcgccctatatctagttctttggtgcccaaagaagggcacccctgcggggttcccccacgccttcggcgcggctccccctccggcaaaaagtggcccctccggggcttgttgatcgactgcgcggccttcggccttgcccaaggtggcgctgcccccttggaacccccgcactcgccgccgtgaggctcggggggcaggcgggcgggcttcgcccttcgactgcccccactcgcataggcttgggtcgttccaggcgcgtcaaggccaagccgctgcgcggtcgctgcgcgagccttgacccgccttccacttggtgtccaaccggcaagcgaagcgcgcaggccgcaggccggaggcttttccccagagaaaattaaaaaaattgatggggcaaggccgcaggccgcgcagttggagccggtgggtatgtggtcgaaggctgggtagccggtgggcaatccctgtggtcaagctcgtgggcaggcgcagcctgtccatcagcttgtccagcagggttgtccacgggccgagcgaagcgagccagccggtggccgctcgcggccatcgtccacatatccacgggctggcaagggagcgcagcgaccgcgcagggcgaagcccggagagcaagcccgtagggcgccgcagccgccgtaggcggtcacgactttgcgaagcaaagtctagtgagtatactcaagcattgagtggcccgccggaggcaccgccttgcgctgcccccgtcgagccggttggacaccaaaagggaggggcaggcatggcggcatacgcgatcatgcgatgcaagaagctggcgaaaatgggcaacgtggcggccagtctcaagcacgcctaccgcgagcgcgagacgcccaacgctgacgccagcaggacgccagagaacgagcactgggcggccagcagcaccgatgaagcgatgggccgactgcgcgagttgctgccagagaagcggcgcaaggacgctgtgttggcggtcgagtacgtcatgacggccagcccggaatggtggaagtcggccagccaagaacagcaggcggcgttcttcgagaaggcgcacaagtggctggcggacaagtacggggcggatcgcatcgtgacggccagcatccaccgtgacgaaaccagcccgcacatgaccgcgttcgtggtgccgctgacgcaggacggcaggctgtcggccaaggagttcatcggcaacaaagcgcagatgacccgcgaccagaccacgtttgcggccgctgtggccgatctagggctgcaacggggcatcgagggcagcaaggcacgtcacacgcgcattcaggcgttctacgaggccctggagcggccaccagtgggccacgtcaccatcagcccgcaagcggtcgagccacgcgcctatgcaccgcagggattggccgaaaagctgggaatctcaaagcgcgttgagacgccggaagccgtggccgaccggctgacaaaagcggttcggcaggggtatgagcctgccctacaggccgccgcaggagcgcgtgagatgcgcaagaaggccgatcaagcccaagagacggcccgtgaccttcgggagcgcctgaagcccgttctggacgccctggggccgttgaatcgggatatgcaggccaaggccgccgcgatcatcaaggccgtgggcgaaaagctgctgacggaacagcgggaagtccagcgccagaaacaggcccagcgccagcaggaacgcgggcgcgcacatttccccgaaaagtgccacctgggatgaatgtcagctactgggctatctggacaagggaaaacgcaagcgcaaagagaaagcaggtagcttgcagtgggcttacatggcgatagctagactgggcggttttatggacagcaagcgaaccggaattgccagctggggcgccctctggtaaggttgggaagccctgcaaagtaaactggatggctttcttgccgccaaggatctgatggcgcaggggatcaagatctgatcaagagacaggatgaggatcgtttcgcatgattgaacaagatggattgcacgcaggttctccggccgcttgggtggagaggctattcggctatgactgggcacaacagacaatcggctgctctgatgccgccgtgttccggctgtcagcgcaggggcgcccggttctttttgtcaagaccgacctgtccggtgccctgaatgaactgcaagacgaggcagcgcggctatcgtggctggccacgacgggcgttccttgcgcagctgtgctcgacgttgtcactgaagcgggaagggactggctgctattgggcgaagtgccggggcaggatctcctgtcatctcaccttgctcctgccgagaaagtatccatcatggctgatgcaatgcggcggctgcatacgcttgatccggctacctgcccattcgaccaccaagcgaaacatcgcatcgagcgagcacgtactcggatggaagccggtcttgtcgatcaggatgatctggacgaagagcatcaggggctcgcgccagccgaactgttcgccaggctcaaggcgcgcatgcccgacggcgaggatctcgtcgtgacccatggcgatgcctgcttgccgaatatcatggtggaaaatggccgcttttctggattcatcgactgtggccggctgggtgtggcggaccgctatcaggacatagcgttggctacccgtgatattgctgaagagcttggcggcgaatgggctgaccgcttcctcgtgctttacggtatcgccgctcccgattcgcagcgcatcgccttctatcgccttcttgacgagttcttctgagcgggactctggggttcgaaatgaccgaccaagcgacgcccaacctgccatcacgagatttcgattccaccgccgccttctatgaaaggttgggcttcggaatcgttttccgggacgccggctggatgatcctccagcgcggggatctcatgctggagttcttcgcccacccccatgggcaaatattatacgcaaggcgacaaggtgctgatgccgctggcgattcaggttcatcatgccgtttgtgatggcttccatgtcggcagaatgcttaatgaattacaacagtttttatgcatgcgcccaatacgcaaaccgcctctccccgcgcgttggccgattcattaatgcagctggcacgacaggtttcccgactggtggataaccgtattaccgcctttgagtgagctgataccgctcgccgcagccgaacgaccgagcgcagcgagtcagtgagcgaggacacaagctttgacagctagctcagtcctaggtataatactagcgtcgacgtggagatataccatgggtgaactgccgagtaggtagctgataaccattcaccgttgcaccacagatgaaaagctgagtgaactgccgagtaggtagctgataacggatccgaattcgagcgaaggagatatacatatgtttttgcaaagacctaaaccttacagcgatgaaagtttagaaagtttctttatccgagtggctaacaaaaatggctacggtgatgtccatcgcttcctagaagccactaaacgattccttcaagacattgaccataatggctatcaaacctttccgactgatataactcggataaacccatactcagctaaaaacagttccagcgcacgaactgcgtcattcctgaaacttgcacaattgacatttaatgaaccgccagagctacttgggttggcaattaacagaacaaacatgaaatactcgccgtcaactagcgcggttgttagaggtgcagaagtctttcctcgcagtttactacggacgcactccatcccctgctgtcctttgtgtctgcgagaaaatggctacgcctcctacctttggcactttcaggggtacgaatactgccacagccataacgtacctttaattaccacttgtagctgtggtaaggagtttgactaccgagtatctgggttaaagggcatttgctgcaaatgcaaggagcctatcaccttaaccagcagggagaacggtcatgaggcagcgtgtactgtttcaaactggcttgctggccatgaatctaaacctctgccaaatcttcctaaaagctaccgatggggtttagttcattggtggatgggtattaaagatagcgagttcgatcacttttcgttcgttcaatttttctcaaactggccaaggtcattccactcgataatcgaagatgaagtagagttcaaccttgagcatgctgttgtcagcacgtctgaattacgactaaaagatcttcttggtcgattgtttttcggttcaattcggttacctgagcggaatcttcaacacaatatcatccttggtgagcttctctgctatttagaaaatcgtttatggcaagacaagggattaatcgccaacctcaaaatgaacgcgttagaggcgactgtaatgttaaattgtagcctcgatcagattgcatcaatggttgaacaacgcatcttgaagccaaatcgaaaaagcaagcccaacagccctcttgatgttaccgattatctatttcatttcggcgatattttctgtctttggttagctgagttccaaagcgatgagtttaaccgttcgttttatgtgtcgaggtggtaaatgcaaactctgaaagaactaatcgcatccaatcctgacgacttaacaactgaacttaagagagcatttcgtccactcacaccgcatattgcaattgatggtaatgaacttgacgcactgacgatattagtcaatttaaccgataagactgatgatcagaaagacctgctcgatcgagccaaatgcaagcaaaaacttcgagatgaaaaatggtgggctagctgcataaattgcgttaattacagacaaagccataacccaaaattcccggatatacgttctgaaggcgtgattcgaacccaagccctgggtgaattaccgagtttcctactctcgtcctcaaaaatcccaccataccattggtcatatagccatgattcaaaatacgtcaacaaaagcgcattcctcaccaatgagttttgttgggatggtgagatctcatgtttgggtgagcttcttaaagatgcagatcacccactttggaatactttgaaaaagttaggttgttctcaaaaaacttgcaaagcaatggcaaaacaactagctgatattactctcacgactatcaatgtcacactcgcaccaaattacctgactcaaatatctctccccgatagtgatacatcctacatttcactctctcctgttgcatcgctatcgatgcaaagccactttcatcagaggctccaagatgaaaatcggcatagcgcgataacgcggtttagccgaactaccaacatgggggtcactgcgatgacatgtggcggcgcatttagaatgttaaagtctggcgctaagttttccagcccccctcatcaccgattaaacagtaaacgaagttggttgacgtcagagcatgttcagtcattaaaacagtaccagcgcctcaacaaaagcctcatacctgaaaactctcggattgcactccgtagaaaatacaaaatcgagcttcaaaatatggtcagatcttggtttgcaatgcaagaccatacccttgattcgaacatacttatccaacatttgaatcatgacctatcttacttaggagccacaaaacgttttgcatacgatccagcgatgaccaagctctttactgagcttttgaaacgagagttatcaaattcaatcaataatggtgagcaacacactaatggatcgtttttagtcctaccgaatatcagggtttgtggcgcaacagctttaagctccccggtaacggtggggattccatcacttacagctttctttggcttcgttcacgcatttgaacggaatataaatcgcaccacctcatcgtttcgtgttgaatcctttgcgatatgcgtccatcaactacatgtcgagaagcgaggtttgacagcagagtttgtggaaaaaggcgacgggactatatccgctcccgcgacccgggatgactggcagtgtgatgtcgtatttagccttattttgaacaccaactttgctcaacatattgaccaagatacgttagttacatcactaccaaagcgattggctcggggttcagcaaaaattgcgattgatgactttaaacatatcaactcattctcgacattagaaacagcgatcgaatctctgccaatagaagctggtaggtggttatcactttacgcacagtcaaacaataatctaagtgatctattagcagccatgacagaggaccatcagctcatggcaagctgcgtcggttaccacttgttagaagagcccaaagataaaccaaactccctcagaggttacaaacacgctatcgccgagtgcatcattggactcattaactcaatcacctttagctcagagactgatcccaacacaatcttttggtcgctaaagaactatcaaaactacctagtggtacagccaaggagtatcaacgatgaaactaccgacaaatctagcctatgagcgctctatcgacccatcagatgtctgtttttttgtcgtctggcccgatgatagaaaaacacctttaacctacaattctcgtactctgctcgggcaaatggaagcggcatcattagcctatgatgtctcaggtcaaccaataaaaagtgccaccgctgaggcgttagctcaagggaaccctcatcaagttgatttctgccacgttccatacggtgcgagtcatattgaatgcagtttctccgtctcgttttcttctgaactacgtcaaccatataagtgtaactcaagcaaagttaaacaaacgctagtgcaattagtcgagctctacgaaacgaaaatcggctggactgagctagcaacccgatatttgatgaacatttgcaacggtaaatggctgtggaaaaatacccgtaaagcctattgctggaacattgtacttacaccttggccttggaacggggaaaaggttggatttgaagatattcgtactaactacacctcacggcaagactttaaaaataataaaaattggtctgctatagttgaaatgatcaaaaccgcattttctagtactgatgggctggcgatatttgaagtcagggccaccttgcacttgccaacgaatgctatggtgcggccaagccaagttttcacagaaaaagaaagtggcagtaaaagtaaatctaaaactcaaaacagtcgagtttttcagagtacaactattgatggtgaacgatcgccaatactaggggcctttaaaacgggagcagctattgcaaccattgacgactggtatcctgaagccactgagccactaagggtcggacggtttggggttcatcgcgaagatgtcacttgctaccgtcatccgtctaccggaaaagattttttctcgatattacaacaagcagagcactatattgaagtgttgagcgccaacaaaactcccgctcaagaaactatcaacgacatgcactttttaatggctaacctgattaagggtgggatgttccagcataaaggagactgactgtgaaatggtattataagacaatcacctttctgccagagttgtgcaacaacgagtcactggctgcaaagtgtctccgcgttctgcatggatttaactatcagtatgagacacgaaatatcggcgtttcatttccgctttggtgtgatgcaacggttggaaaaaagatttcatttgtcagcaagaacaagatagaactcgacttactacttaaacaacactatttcgtccaaatggaacaacttcaatactttcatatatccaacactgttctcgtcccagaagattgtacatacgtttcctttagacgctgtcaatctatagataagctcacagcagcagggctggcaaggaaaatcagacgcctggagaaacgtgctctatctagaggcgagcaatttgacccatcatcttttgctcaaaaagagcatactgcaatagcgcactaccactcacttggggagtccagcaaacagacgaaccgcaactttcgactcaatatcaggatgctctcggagcaaccccgtgaggggaactcgatttttagtagctatggcttatcaaattcagaaaactcgtttcagcctgtacccttaatctgacctttaataaggagatataccatggcgacaagtttacctacgccctcagcaattacgacttcggcgttagagtatgcattccatactcccgctcgcaatctaacgaaatctcgcggaaaaaacattcatcgttatgtcagtgtaaagatgagtaagaggattacggtagaatctactctagagtgtgatgcctgctatcactttgattttgagccaagtattgttcgcttttgcgctcaaccgattcgatttttatattatctcaatggtcagtctcactcctatgttcctgactttctagttcaatttgataccaacgagtttgttctatatgaagtaaagtcagcttatgctaagaacaaacctgattttgatgttgaatgggaggcgaaagtaaaagcagcaactgaactagggctagaattggagcttgttgaagagagtgatattagggatacggttgtattaaataatcttaagcgcatgcatcgttatgcttcgaaagatgagctgaataacgtacataactctctcttaaaaataataaagtacaatggcgcccaatctgcaagatgcttgggagaacagttgggtttaaaaggccgaactgttttaccaattttgtgcgatttgctgtcaaggtgtttactcgatacacgtttggataagcctctatctcttgaatctcgatttgagttggccagttatggctaagaaagggttctcaagtttccatagaaaagcagtctcttcccaagatacgcttgaatcgatagagcttgtctctagcgctaattgtctagaaagtgttacgtatcaagatatatcagcatttcccgaaacaattgcggtagagattaatttccgattaagcattcttcgctttttagcgcgaaagtgcgaaaccattgtggccaaatcaattgaaccacatcgtgtagagctacagcaaaactatagtagaaaaatacccagtgcaataacgatatatcgatggtggcttgcttttcgaaaatcagactacaaccccattagcttagcacctaatatcaaggatagaggtaatagagagacaaaagtgtcaacagttgttgattctattatggaacaggcagttgaaagagttatatctggacgaaaagtcaatgttagctctgcatataaacgtgttcgacgaaaagttcgtcaatacaatctaactcatggaacgaaatacacgtatcctaagtacgaatctgtaagaaagcgagtaaaaaagaaaaccccatttgagttattagccgcagggaaaggggagagagtagctaagagagagtttcgccgaatgggaaaaaagatcctcacgtctagcgtgctagagagggttgaaatagatcacactgtcgttgacctttttgcagtacacgaagagtatcgaatcccattgggccgaccttggcttactcaattggttgattgttacagtaaagctgtaatcggtttttatttaggtttcgagcctcctagctatgtgtcggtttcccttgcacttaagaatgcaatacaacgcaaagatgacttaatctcctcgtatgaatcgatcgagaatgaatggctatgttatggcatcccagacctactcgtaactgataatggtaaagagtttttgtcgaaagcatttgatcaagcatgtgaatcactattgatcaatgtgcatcaaaataaagttgagacgcccgacaacaaacctcatgttgaacgtaactacgggactattaatacttctctgttagacgatttacctgggaaatccttcagccagtaccttcaaagagaagggtacgactctgtgggagaagctacccttacactcaatgagattagagaaatttacttaatttggttggtggatatttatcataaaaaacccaatcagagaggcactaattgtcctaatgttgcgtggaaaaagggttgtcaagaatgggaaccagaggagttctctggttctaaagacgaattagactttaaatttgctattgttgattacaaacaacttactaaagtagggataactgtctacaaagaactgagttatagcaatgaccgtttagctgaatatagagggaagaaaggaaaccataaagttcagttcaagtataaccctgagtgtatggcagttatttgggtgttggatgaggatatgaatgagtactttacagttaatgcgattgactacgaatatgcaagtagagtatcactttggcaacataaatataacatgaaatatcaagcagaactaaattcagcagaatatgatgaggacaaggaaattgatgcagaaataaaaattgaagaaatcgcagatcgttcaattgttaagactaacaaaatcagagctcggaggcgtggcgctaggcatcaagagaatagcgcaagggctaagtcaatcagtaatgcgaacccggcctcgatacaaaaacatgaagatgaaatcgttagtgcagataatgacgattgggatattgattatgtctgagaaatcgtcaaatgagtgaaacgcgtgaggctcgtatatcaagagctaaaagggcatttgtatccacaccgagcgttaggaaaatcttgagttacatggatagatgtagagatctatcagacctagagtctgagcctacatgcatgatggtctatggtgcttcgggtgtaggtaaaacgaccgtcatcaagaaatacttaaatcaaaacagaagagagtccgaagccgggggcgatataataccggttttgcatattgagttgccagacaatgcgaagccagtagatgcagcaagggaattgctggttgaaatgggtgacccgctagcactttatgaaactgacttagctagattgacgaaaagactgactgaattaatccctgcggtcggcgtgaagctgattattatcgatgagttccaacatttggtggaagaaaggtcaaatcgggttcttacccaagtaggtaattggctaaaaatgatacttaacaaaacgaaatgtccaattgttatatttggtatgccatactcaaaagttgtactgcaagcaaactcgcaacttcacgggcgattttccattcaggttgaactgcgcccctttagctaccagggaggtagaggtgtatttaaaacttttttggaataccttgataaagccctaccttttgaaaaacaggctggcttagccaacgaaagtttgcagaaaaaattgtatgcattctctcagggaaacatgcgttcgttgagaaaccttatttatcaagcatctatcgaagcaattgataatcagcatgagacgataaccgaagaagatttcgtttttgcatcgaagttgacatcgggcgataaacccaactcatggaaaaatccttttgaggagggtgttgaggtaacagaagatatgttacgaccgccaccaaaagatattggttgggaggactatttgagacattcaaccccgagagtgagtaaaccaggtagaaataaaaactttttcgaataacctaggctgctgcgctgctgccaccgctgagcaataactagcataaccccttggggcctctaaacgggtcttgaggggttttttgctgaaacctcaggcatgttggaacaaccataaaatgataattacacccataaattgataattatcacacccataaattgatattgcctcttcatggtctaaacttcagtaagtttacgacattttcatgaagaggtcatttccggggatccatggagaaaaaaatcactggatataccaccgttgatatatcccaatggcatcgtaaagaacattttgaggcatttcagtcagttgctcaatgtacctataaccagaccgttcagctggatattacggcctttttaaagaccgtaaagaaaaataagcacaagttttatccggcctttattcacattcttgcccgcctgatgaatgctcatccggagttccgtatggcaatgaaagacggtgagctggtgatatgggatagtgttcacccttgttacaccgttttccatgagcaaactgaaacgttttcatcgctctggagtgaataccacgacgatttccggcagtttctacacatatattcgcaagatgtggcgtgttacggtgaaaacctggcctatttccctaaagggtttattgagaatatgtttttcgtctcagccaatccctgggtgagtttcaccagttttgatttaaacgtggccaatatggacaacttcttcgcccccgttttcactatgggcaaatattatacgcaaggcgacaaggtgctgatgccgctggcgattcaggttcatcatgccgtttgtgatggcttccatgtcggcagaatgcttaatgaattacaacagtactgcgatgagtggcagggcggggcgtaatttttttaaggcagttattggtgcccttctagagtccttactgcagtagttttgctgaaatactcgattcacaaaaatatcaacttatggttgttttgtgagatatcaatatatggttgttttgtggttaagttgctgattataaataattattaaatatcactttatggttgcatcaacaggtaccgagctcgaattcactggccgtcgttttacaacgtcgtgactgggaaaaccctggcgttacccaacttaatcgccttgcggccagtttgctcaggctctccccgtggaggtaataattgacgatatgatcatttattctgcctcccagagcctgataaaaacggtgaatccgttagcgaggtgccgccggcttccattcaggtcgaggtggcccggctccatgcaccgcgacgcaacgcggggaggcagacaaggtatagggcggcgaggcggctacagccgatagtctggaacagcgcacttacgggttgctgcgcaacccaagtgctaccggcgcggcagcgtgacccgtgtcggcggctccaacggctcgccatcgtccagaaaacacggctcatcgggcatcggcaggcgctgctgcccgcgccgttcccattcctccgtttcggtcaaggctggcaggtctggttccatgcccggaatgccgggctggctgggcggctcctcgccggggccggtcggtagttgctgctcgcccggatacagggtcgggatgcggcgcaggtcgccatgccccaacagcgattcgtcctggtcgtcgtgatcaaccaccacggcggcactgaacaccgacaggcgcaactggtcgcggggctggccccacgccacgcggtcattgaccacgtaggccgacacggtgccggggccgttgagcttcacgacggagatccagcgctcggccaccaagtccttgactgcgtattggaccgtccgcaaagaacgtccgatgagcttggaaagtgtcttctggctgaccaccacggcgttctggtggcccatctgcgccacgaggtgatgcagcagcattg

SEQ ID NO: 101 - DNA, 14028 bp, artificial sequence
  Synthetic
ccgccgtgggtttcctcgcaataagcccggcccacgcctcatgcgctttgcgttccgtttgcacccagtgaccgggcttgttcttggcttgaatgccgatttctctggactgcgtggccatgcttatctccatgcggtaggggtgccgcacggttgcggcaccatgcgcaatcagctgcaacttttcggcagcgcgacaacaattatgcgttgcgtaaaagtggcagtcaattacagattttctttaacctacgcaatgagctattgcggggggtgccgcaatgagctgttgcgtaccccccttttttaagttgttgatttttaagtctttcgcatttcgccctatatctagttctttggtgcccaaagaagggcacccctgcggggttcccccacgccttcggcgcggctccccctccggcaaaaagtggcccctccggggcttgttgatcgactgcgcggccttcggccttgcccaaggtggcgctgcccccttggaacccccgcactcgccgccgtgaggctcggggggcaggcgggcgggcttcgcccttcgactgcccccactcgcataggcttgggtcgttccaggcgcgtcaaggccaagccgctgcgcggtcgctgcgcgagccttgacccgccttccacttggtgtccaaccggcaagcgaagcgcgcaggccgcaggccggaggcttttccccagagaaaattaaaaaaattgatggggcaaggccgcaggccgcgcagttggagccggtgggtatgtggtcgaaggctgggtagccggtgggcaatccctgtggtcaagctcgtgggcaggcgcagcctgtccatcagcttgtccagcagggttgtccacgggccgagcgaagcgagccagccggtggccgctcgcggccatcgtccacatatccacgggctggcaagggagcgcagcgaccgcgcagggcgaagcccggagagcaagcccgtagggcgccgcagccgccgtaggcggtcacgactttgcgaagcaaagtctagtgagtatactcaagcattgagtggcccgccggaggcaccgccttgcgctgcccccgtcgagccggttggacaccaaaagggaggggcaggcatggcggcatacgcgatcatgcgatgcaagaagctggcgaaaatgggcaacgtggcggccagtctcaagcacgcctaccgcgagcgcgagacgcccaacgctgacgccagcaggacgccagagaacgagcactgggcggccagcagcaccgatgaagcgatgggccgactgcgcgagttgctgccagagaagcggcgcaaggacgctgtgttggcggtcgagtacgtcatgacggccagcccggaatggtggaagtcggccagccaagaacagcaggcggcgttcttcgagaaggcgcacaagtggctggcggacaagtacggggcggatcgcatcgtgacggccagcatccaccgtgacgaaaccagcccgcacatgaccgcgttcgtggtgccgctgacgcaggacggcaggctgtcggccaaggagttcatcggcaacaaagcgcagatgacccgcgaccagaccacgtttgcggccgctgtggccgatctagggctgcaacggggcatcgagggcagcaaggcacgtcacacgcgcattcaggcgttctacgaggccctggagcggccaccagtgggccacgtcaccatcagcccgcaagcggtcgagccacgcgcctatgcaccgcagggattggccgaaaagctgggaatctcaaagcgcgttgagacgccggaagccgtggccgaccggctgacaaaagcggttcggcaggggtatgagcctgccctacaggccgccgcaggagcgcgtgagatgcgcaagaaggccgatcaagcccaagagacggcccgtgaccttcgggagcgcctgaagcccgttctggacgccctggggccgttgaatcgggatatgcaggccaaggccgccgcgatcatcaaggccgtgggcgaaaagctgctgacggaacagcgggaagtccagcgccagaaacaggcccagcgccagcaggaacgcgggcgcgcacatttccccgaaaagtgccacctgggatgaatgtcagctactgggctatctggacaagggaaaacgcaagcgcaaagagaaagcaggtagcttgcagtgggcttacatggcgatagctagactgggcggttttatggacagcaagcgaaccggaattgccagctggggcgccctctggtaaggttgggaagccctgcaaagtaaactggatggctttcttgccgccaaggatctgatggcgcaggggatcaagatctgatcaagagacaggatgaggatcgtttcgcatgattgaacaagatggattgcacgcaggttctccggccgcttgggtggagaggctattcggctatgactgggcacaacagacaatcggctgctctgatgccgccgtgttccggctgtcagcgcaggggcgcccggttctttttgtcaagaccgacctgtccggtgccctgaatgaactgcaagacgaggcagcgcggctatcgtggctggccacgacgggcgttccttgcgcagctgtgctcgacgttgtcactgaagcgggaagggactggctgctattgggcgaagtgccggggcaggatctcctgtcatctcaccttgctcctgccgagaaagtatccatcatggctgatgcaatgcggcggctgcatacgcttgatccggctacctgcccattcgaccaccaagcgaaacatcgcatcgagcgagcacgtactcggatggaagccggtcttgtcgatcaggatgatctggacgaagagcatcaggggctcgcgccagccgaactgttcgccaggctcaaggcgcgcatgcccgacggcgaggatctcgtcgtgacccatggcgatgcctgcttgccgaatatcatggtggaaaatggccgcttttctggattcatcgactgtggccggctgggtgtggcggaccgctatcaggacatagcgttggctacccgtgatattgctgaagagcttggcggcgaatgggctgaccgcttcctcgtgctttacggtatcgccgctcccgattcgcagcgcatcgccttctatcgccttcttgacgagttcttctgagcgggactctggggttcgaaatgaccgaccaagcgacgcccaacctgccatcacgagatttcgattccaccgccgccttctatgaaaggttgggcttcggaatcgttttccgggacgccggctggatgatcctccagcgcggggatctcatgctggagttcttcgcccacccccatgggcaaatattatacgcaaggcgacaaggtgctgatgccgctggcgattcaggttcatcatgccgtttgtgatggcttccatgtcggcagaatgcttaatgaattacaacagtttttatgcatgcgcccaatacgcaaaccgcctctccccgcgcgttggccgattcattaatgcagctggcacgacaggtttcccgactggtggataaccgtattaccgcctttgagtgagctgataccgctcgccgcagccgaacgaccgagcgcagcgagtcagtgagcgaggacacaagctttgacagctagctcagtcctaggtataatactagcgtcgacgtggagatataccatgggtgaactgccgagtaggtagctgataacctttatcgcggcgacgaacgttttgccatgtggtgaactgccgagtaggtagctgataacggatccgaattcgagcgaaggagatatacatatgtttttgcaaagacctaaaccttacagcgatgaaagtttagaaagtttctttatccgagtggctaacaaaaatggctacggtgatgtccatcgcttcctagaagccactaaacgattccttcaagacattgaccataatggctatcaaacctttccgactgatataactcggataaacccatactcagctaaaaacagttccagcgcacgaactgcgtcattcctgaaacttgcacaattgacatttaatgaaccgccagagctacttgggttggcaattaacagaacaaacatgaaatactcgccgtcaactagcgcggttgttagaggtgcagaagtctttcctcgcagtttactacggacgcactccatcccctgctgtcctttgtgtctgcgagaaaatggctacgcctcctacctttggcactttcaggggtacgaatactgccacagccataacgtacctttaattaccacttgtagctgtggtaaggagtttgactaccgagtatctgggttaaagggcatttgctgcaaatgcaaggagcctatcaccttaaccagcagggagaacggtcatgaggcagcgtgtactgtttcaaactggcttgctggccatgaatctaaacctctgccaaatcttcctaaaagctaccgatggggtttagttcattggtggatgggtattaaagatagcgagttcgatcacttttcgttcgttcaatttttctcaaactggccaaggtcattccactcgataatcgaagatgaagtagagttcaaccttgagcatgctgttgtcagcacgtctgaattacgactaaaagatcttcttggtcgattgtttttcggttcaattcggttacctgagcggaatcttcaacacaatatcatccttggtgagcttctctgctatttagaaaatcgtttatggcaagacaagggattaatcgccaacctcaaaatgaacgcgttagaggcgactgtaatgttaaattgtagcctcgatcagattgcatcaatggttgaacaacgcatcttgaagccaaatcgaaaaagcaagcccaacagccctcttgatgttaccgattatctatttcatttcggcgatattttctgtctttggttagctgagttccaaagcgatgagtttaaccgttcgttttatgtgtcgaggtggtaaatgcaaactctgaaagaactaatcgcatccaatcctgacgacttaacaactgaacttaagagagcatttcgtccactcacaccgcatattgcaattgatggtaatgaacttgacgcactgacgatattagtcaatttaaccgataagactgatgatcagaaagacctgctcgatcgagccaaatgcaagcaaaaacttcgagatgaaaaatggtgggctagctgcataaattgcgttaattacagacaaagccataacccaaaattcccggatatacgttctgaaggcgtgattcgaacccaagccctgggtgaattaccgagtttcctactctcgtcctcaaaaatcccaccataccattggtcatatagccatgattcaaaatacgtcaacaaaagcgcattcctcaccaatgagttttgttgggatggtgagatctcatgtttgggtgagcttcttaaagatgcagatcacccactttggaatactttgaaaaagttaggttgttctcaaaaaacttgcaaagcaatggcaaaacaactagctgatattactctcacgactatcaatgtcacactcgcaccaaattacctgactcaaatatctctccccgatagtgatacatcctacatttcactctctcctgttgcatcgctatcgatgcaaagccactttcatcagaggctccaagatgaaaatcggcatagcgcgataacgcggtttagccgaactaccaacatgggggtcactgcgatgacatgtggcggcgcatttagaatgttaaagtctggcgctaagttttccagcccccctcatcaccgattaaacagtaaacgaagttggttgacgtcagagcatgttcagtcattaaaacagtaccagcgcctcaacaaaagcctcatacctgaaaactctcggattgcactccgtagaaaatacaaaatcgagcttcaaaatatggtcagatcttggtttgcaatgcaagaccatacccttgattcgaacatacttatccaacatttgaatcatgacctatcttacttaggagccacaaaacgttttgcatacgatccagcgatgaccaagctctttactgagcttttgaaacgagagttatcaaattcaatcaataatggtgagcaacacactaatggatcgtttttagtcctaccgaatatcagggtttgtggcgcaacagctttaagctccccggtaacggtggggattccatcacttacagctttctttggcttcgttcacgcatttgaacggaatataaatcgcaccacctcatcgtttcgtgttgaatcctttgcgatatgcgtccatcaactacatgtcgagaagcgaggtttgacagcagagtttgtggaaaaaggcgacgggactatatccgctcccgcgacccgggatgactggcagtgtgatgtcgtatttagccttattttgaacaccaactttgctcaacatattgaccaagatacgttagttacatcactaccaaagcgattggctcggggttcagcaaaaattgcgattgatgactttaaacatatcaactcattctcgacattagaaacagcgatcgaatctctgccaatagaagctggtaggtggttatcactttacgcacagtcaaacaataatctaagtgatctattagcagccatgacagaggaccatcagctcatggcaagctgcgtcggttaccacttgttagaagagcccaaagataaaccaaactccctcagaggttacaaacacgctatcgccgagtgcatcattggactcattaactcaatcacctttagctcagagactgatcccaacacaatcttttggtcgctaaagaactatcaaaactacctagtggtacagccaaggagtatcaacgatgaaactaccgacaaatctagcctatgagcgctctatcgacccatcagatgtctgtttttttgtcgtctggcccgatgatagaaaaacacctttaacctacaattctcgtactctgctcgggcaaatggaagcggcatcattagcctatgatgtctcaggtcaaccaataaaaagtgccaccgctgaggcgttagctcaagggaaccctcatcaagttgatttctgccacgttccatacggtgcgagtcatattgaatgcagtttctccgtctcgttttcttctgaactacgtcaaccatataagtgtaactcaagcaaagttaaacaaacgctagtgcaattagtcgagctctacgaaacgaaaatcggctggactgagctagcaacccgatatttgatgaacatttgcaacggtaaatggctgtggaaaaatacccgtaaagcctattgctggaacattgtacttacaccttggccttggaacggggaaaaggttggatttgaagatattcgtactaactacacctcacggcaagactttaaaaataataaaaattggtctgctatagttgaaatgatcaaaaccgcattttctagtactgatgggctggcgatatttgaagtcagggccaccttgcacttgccaacgaatgctatggtgcggccaagccaagttttcacagaaaaagaaagtggcagtaaaagtaaatctaaaactcaaaacagtcgagtttttcagagtacaactattgatggtgaacgatcgccaatactaggggcctttaaaacgggagcagctattgcaaccattgacgactggtatcctgaagccactgagccactaagggtcggacggtttggggttcatcgcgaagatgtcacttgctaccgtcatccgtctaccggaaaagattttttctcgatattacaacaagcagagcactatattgaagtgttgagcgccaacaaaactcccgctcaagaaactatcaacgacatgcactttttaatggctaacctgattaagggtgggatgttccagcataaaggagactgactgtgaaatggtattataagacaatcacctttctgccagagttgtgcaacaacgagtcactggctgcaaagtgtctccgcgttctgcatggatttaactatcagtatgagacacgaaatatcggcgtttcatttccgctttggtgtgatgcaacggttggaaaaaagatttcatttgtcagcaagaacaagatagaactcgacttactacttaaacaacactatttcgtccaaatggaacaacttcaatactttcatatatccaacactgttctcgtcccagaagattgtacatacgtttcctttagacgctgtcaatctatagataagctcacagcagcagggctggcaaggaaaatcagacgcctggagaaacgtgctctatctagaggcgagcaatttgacccatcatcttttgctcaaaaagagcatactgcaatagcgcactaccactcacttggggagtccagcaaacagacgaaccgcaactttcgactcaatatcaggatgctctcggagcaaccccgtgaggggaactcgatttttagtagctatggcttatcaaattcagaaaactcgtttcagcctgtacccttaatctgacctttaataaggagatataccatggcgacaagtttacctacgccctcagcaattacgacttcggcgttagagtatgcattccatactcccgctcgcaatctaacgaaatctcgcggaaaaaacattcatcgttatgtcagtgtaaagatgagtaagaggattacggtagaatctactctagagtgtgatgcctgctatcactttgattttgagccaagtattgttcgcttttgcgctcaaccgattcgatttttatattatctcaatggtcagtctcactcctatgttcctgactttctagttcaatttgataccaacgagtttgttctatatgaagtaaagtcagcttatgctaagaacaaacctgattttgatgttgaatgggaggcgaaagtaaaagcagcaactgaactagggctagaattggagcttgttgaagagagtgatattagggatacggttgtattaaataatcttaagcgcatgcatcgttatgcttcgaaagatgagctgaataacgtacataactctctcttaaaaataataaagtacaatggcgcccaatctgcaagatgcttgggagaacagttgggtttaaaaggccgaactgttttaccaattttgtgcgatttgctgtcaaggtgtttactcgatacacgtttggataagcctctatctcttgaatctcgatttgagttggccagttatggctaagaaagggttctcaagtttccatagaaaagcagtctcttcccaagatacgcttgaatcgatagagcttgtctctagcgctaattgtctagaaagtgttacgtatcaagatatatcagcatttcccgaaacaattgcggtagagattaatttccgattaagcattcttcgctttttagcgcgaaagtgcgaaaccattgtggccaaatcaattgaaccacatcgtgtagagctacagcaaaactatagtagaaaaatacccagtgcaataacgatatatcgatggtggcttgcttttcgaaaatcagactacaaccccattagcttagcacctaatatcaaggatagaggtaatagagagacaaaagtgtcaacagttgttgattctattatggaacaggcagttgaaagagttatatctggacgaaaagtcaatgttagctctgcatataaacgtgttcgacgaaaagttcgtcaatacaatctaactcatggaacgaaatacacgtatcctaagtacgaatctgtaagaaagcgagtaaaaaagaaaaccccatttgagttattagccgcagggaaaggggagagagtagctaagagagagtttcgccgaatgggaaaaaagatcctcacgtctagcgtgctagagagggttgaaatagatcacactgtcgttgacctttttgcagtacacgaagagtatcgaatcccattgggccgaccttggcttactcaattggttgattgttacagtaaagctgtaatcggtttttatttaggtttcgagcctcctagctatgtgtcggtttcccttgcacttaagaatgcaatacaacgcaaagatgacttaatctcctcgtatgaatcgatcgagaatgaatggctatgttatggcatcccagacctactcgtaactgataatggtaaagagtttttgtcgaaagcatttgatcaagcatgtgaatcactattgatcaatgtgcatcaaaataaagttgagacgcccgacaacaaacctcatgttgaacgtaactacgggactattaatacttctctgttagacgatttacctgggaaatccttcagccagtaccttcaaagagaagggtacgactctgtgggagaagctacccttacactcaatgagattagagaaatttacttaatttggttggtggatatttatcataaaaaacccaatcagagaggcactaattgtcctaatgttgcgtggaaaaagggttgtcaagaatgggaaccagaggagttctctggttctaaagacgaattagactttaaatttgctattgttgattacaaacaacttactaaagtagggataactgtctacaaagaactgagttatagcaatgaccgtttagctgaatatagagggaagaaaggaaaccataaagttcagttcaagtataaccctgagtgtatggcagttatttgggtgttggatgaggatatgaatgagtactttacagttaatgcgattgactacgaatatgcaagtagagtatcactttggcaacataaatataacatgaaatatcaagcagaactaaattcagcagaatatgatgaggacaaggaaattgatgcagaaataaaaattgaagaaatcgcagatcgttcaattgttaagactaacaaaatcagagctcggaggcgtggcgctaggcatcaagagaatagcgcaagggctaagtcaatcagtaatgcgaacccggcctcgatacaaaaacatgaagatgaaatcgttagtgcagataatgacgattgggatattgattatgtctgagaaatcgtcaaatgagtgaaacgcgtgaggctcgtatatcaagagctaaaagggcatttgtatccacaccgagcgttaggaaaatcttgagttacatggatagatgtagagatctatcagacctagagtctgagcctacatgcatgatggtctatggtgcttcgggtgtaggtaaaacgaccgtcatcaagaaatacttaaatcaaaacagaagagagtccgaagccgggggcgatataataccggttttgcatattgagttgccagacaatgcgaagccagtagatgcagcaagggaattgctggttgaaatgggtgacccgctagcactttatgaaactgacttagctagattgacgaaaagactgactgaattaatccctgcggtcggcgtgaagctgattattatcgatgagttccaacatttggtggaagaaaggtcaaatcgggttcttacccaagtaggtaattggctaaaaatgatacttaacaaaacgaaatgtccaattgttatatttggtatgccatactcaaaagttgtactgcaagcaaactcgcaacttcacgggcgattttccattcaggttgaactgcgcccctttagctaccagggaggtagaggtgtatttaaaacttttttggaataccttgataaagccctaccttttgaaaaacaggctggcttagccaacgaaagtttgcagaaaaaattgtatgcattctctcagggaaacatgcgttcgttgagaaaccttatttatcaagcatctatcgaagcaattgataatcagcatgagacgataaccgaagaagatttcgtttttgcatcgaagttgacatcgggcgataaacccaactcatggaaaaatccttttgaggagggtgttgaggtaacagaagatatgttacgaccgccaccaaaagatattggttgggaggactatttgagacattcaaccccgagagtgagtaaaccaggtagaaataaaaactttttcgaataacctaggctgctgcgctgctgccaccgctgagcaataactagcataaccccttggggcctctaaacgggtcttgaggggttttttgctgaaacctcaggcatgttggaacaaccataaaatgataattacacccataaattgataattatcacacccataaattgatattgcctcttcatggtctaaacttcagtaagtttacgacattttcatgaagaggtcatttccggggatccatggagaaaaaaatcactggatataccaccgttgatatatcccaatggcatcgtaaagaacattttgaggcatttcagtcagttgctcaatgtacctataaccagaccgttcagctggatattacggcctttttaaagaccgtaaagaaaaataagcacaagttttatccggcctttattcacattcttgcccgcctgatgaatgctcatccggagttccgtatggcaatgaaagacggtgagctggtgatatgggatagtgttcacccttgttacaccgttttccatgagcaaactgaaacgttttcatcgctctggagtgaataccacgacgatttccggcagtttctacacatatattcgcaagatgtggcgtgttacggtgaaaacctggcctatttccctaaagggtttattgagaatatgtttttcgtctcagccaatccctgggtgagtttcaccagttttgatttaaacgtggccaatatggacaacttcttcgcccccgttttcactatgggcaaatattatacgcaaggcgacaaggtgctgatgccgctggcgattcaggttcatcatgccgtttgtgatggcttccatgtcggcagaatgcttaatgaattacaacagtactgcgatgagtggcagggcggggcgtaatttttttaaggcagttattggtgcccttctagagtccttactgcagtagttttgctgaaatactcgattcacaaaaatatcaacttatggttgttttgtgagatatcaatatatggttgttttgtggttaagttgctgattataaataattattaaatatcactttatggttgcatcaacaggtaccgagctcgaattcactggccgtcgttttacaacgtcgtgactgggaaaaccctggcgttacccaacttaatcgccttgcggccagtttgctcaggctctccccgtggaggtaataattgacgatatgatcatttattctgcctcccagagcctgataaaaacggtgaatccgttagcgaggtgccgccggcttccattcaggtcgaggtggcccggctccatgcaccgcgacgcaacgcggggaggcagacaaggtatagggcggcgaggcggctacagccgatagtctggaacagcgcacttacgggttgctgcgcaacccaagtgctaccggcgcggcagcgtgacccgtgtcggcggctccaacggctcgccatcgtccagaaaacacggctcatcgggcatcggcaggcgctgctgcccgcgccgttcccattcctccgtttcggtcaaggctggcaggtctggttccatgcccggaatgccgggctggctgggcggctcctcgccggggccggtcggtagttgctgctcgcccggatacagggtcgggatgcggcgcaggtcgccatgccccaacagcgattcgtcctggtcgtcgtgatcaaccaccacggcggcactgaacaccgacaggcgcaactggtcgcggggctggccccacgccacgcggtcattgaccacgtaggccgacacggtgccggggccgttgagcttcacgacggagatccagcgctcggccaccaagtccttgactgcgtattggaccgtccgcaaagaacgtccgatgagcttggaaagtgtcttctggctgaccaccacggcgttctggtggcccatctgcgccacgaggtgatgcagcagcattg

SEQ ID NO: 102 - DNA, 14028 bp, artificial sequence
  Synthetic
ccgccgtgggtttcctcgcaataagcccggcccacgcctcatgcgctttgcgttccgtttgcacccagtgaccgggcttgttcttggcttgaatgccgatttctctggactgcgtggccatgcttatctccatgcggtaggggtgccgcacggttgcggcaccatgcgcaatcagctgcaacttttcggcagcgcgacaacaattatgcgttgcgtaaaagtggcagtcaattacagattttctttaacctacgcaatgagctattgcggggggtgccgcaatgagctgttgcgtaccccccttttttaagttgttgatttttaagtctttcgcatttcgccctatatctagttctttggtgcccaaagaagggcacccctgcggggttcccccacgccttcggcgcggctccccctccggcaaaaagtggcccctccggggcttgttgatcgactgcgcggccttcggccttgcccaaggtggcgctgcccccttggaacccccgcactcgccgccgtgaggctcggggggcaggcgggcgggcttcgcccttcgactgcccccactcgcataggcttgggtcgttccaggcgcgtcaaggccaagccgctgcgcggtcgctgcgcgagccttgacccgccttccacttggtgtccaaccggcaagcgaagcgcgcaggccgcaggccggaggcttttccccagagaaaattaaaaaaattgatggggcaaggccgcaggccgcgcagttggagccggtgggtatgtggtcgaaggctgggtagccggtgggcaatccctgtggtcaagctcgtgggcaggcgcagcctgtccatcagcttgtccagcagggttgtccacgggccgagcgaagcgagccagccggtggccgctcgcggccatcgtccacatatccacgggctggcaagggagcgcagcgaccgcgcagggcgaagcccggagagcaagcccgtagggcgccgcagccgccgtaggcggtcacgactttgcgaagcaaagtctagtgagtatactcaagcattgagtggcccgccggaggcaccgccttgcgctgcccccgtcgagccggttggacaccaaaagggaggggcaggcatggcggcatacgcgatcatgcgatgcaagaagctggcgaaaatgggcaacgtggcggccagtctcaagcacgcctaccgcgagcgcgagacgcccaacgctgacgccagcaggacgccagagaacgagcactgggcggccagcagcaccgatgaagcgatgggccgactgcgcgagttgctgccagagaagcggcgcaaggacgctgtgttggcggtcgagtacgtcatgacggccagcccggaatggtggaagtcggccagccaagaacagcaggcggcgttcttcgagaaggcgcacaagtggctggcggacaagtacggggcggatcgcatcgtgacggccagcatccaccgtgacgaaaccagcccgcacatgaccgcgttcgtggtgccgctgacgcaggacggcaggctgtcggccaaggagttcatcggcaacaaagcgcagatgacccgcgaccagaccacgtttgcggccgctgtggccgatctagggctgcaacggggcatcgagggcagcaaggcacgtcacacgcgcattcaggcgttctacgaggccctggagcggccaccagtgggccacgtcaccatcagcccgcaagcggtcgagccacgcgcctatgcaccgcagggattggccgaaaagctgggaatctcaaagcgcgttgagacgccggaagccgtggccgaccggctgacaaaagcggttcggcaggggtatgagcctgccctacaggccgccgcaggagcgcgtgagatgcgcaagaaggccgatcaagcccaagagacggcccgtgaccttcgggagcgcctgaagcccgttctggacgccctggggccgttgaatcgggatatgcaggccaaggccgccgcgatcatcaaggccgtgggcgaaaagctgctgacggaacagcgggaagtccagcgccagaaacaggcccagcgccagcaggaacgcgggcgcgcacatttccccgaaaagtgccacctgggatgaatgtcagctactgggctatctggacaagggaaaacgcaagcgcaaagagaaagcaggtagcttgcagtgggcttacatggcgatagctagactgggcggttttatggacagcaagcgaaccggaattgccagctggggcgccctctggtaaggttgggaagccctgcaaagtaaactggatggctttcttgccgccaaggatctgatggcgcaggggatcaagatctgatcaagagacaggatgaggatcgtttcgcatgattgaacaagatggattgcacgcaggttctccggccgcttgggtggagaggctattcggctatgactgggcacaacagacaatcggctgctctgatgccgccgtgttccggctgtcagcgcaggggcgcccggttctttttgtcaagaccgacctgtccggtgccctgaatgaactgcaagacgaggcagcgcggctatcgtggctggccacgacgggcgttccttgcgcagctgtgctcgacgttgtcactgaagcgggaagggactggctgctattgggcgaagtgccggggcaggatctcctgtcatctcaccttgctcctgccgagaaagtatccatcatggctgatgcaatgcggcggctgcatacgcttgatccggctacctgcccattcgaccaccaagcgaaacatcgcatcgagcgagcacgtactcggatggaagccggtcttgtcgatcaggatgatctggacgaagagcatcaggggctcgcgccagccgaactgttcgccaggctcaaggcgcgcatgcccgacggcgaggatctcgtcgtgacccatggcgatgcctgcttgccgaatatcatggtggaaaatggccgcttttctggattcatcgactgtggccggctgggtgtggcggaccgctatcaggacatagcgttggctacccgtgatattgctgaagagcttggcggcgaatgggctgaccgcttcctcgtgctttacggtatcgccgctcccgattcgcagcgcatcgccttctatcgccttcttgacgagttcttctgagcgggactctggggttcgaaatgaccgaccaagcgacgcccaacctgccatcacgagatttcgattccaccgccgccttctatgaaaggttgggcttcggaatcgttttccgggacgccggctggatgatcctccagcgcggggatctcatgctggagttcttcgcccacccccatgggcaaatattatacgcaaggcgacaaggtgctgatgccgctggcgattcaggttcatcatgccgtttgtgatggcttccatgtcggcagaatgcttaatgaattacaacagtttttatgcatgcgcccaatacgcaaaccgcctctccccgcgcgttggccgattcattaatgcagctggcacgacaggtttcccgactggtggataaccgtattaccgcctttgagtgagctgataccgctcgccgcagccgaacgaccgagcgcagcgagtcagtgagcgaggacacaagctttgacagctagctcagtcctaggtataatactagcgtcgacgtggagatataccatgggtgaactgccgagtaggtagctgataacccttcaggagaaacgtcaacgtcgtggaagcagtgaactgccgagtaggtagctgataacggatccgaattcgagcgaaggagatatacatatgtttttgcaaagacctaaaccttacagcgatgaaagtttagaaagtttctttatccgagtggctaacaaaaatggctacggtgatgtccatcgcttcctagaagccactaaacgattccttcaagacattgaccataatggctatcaaacctttccgactgatataactcggataaacccatactcagctaaaaacagttccagcgcacgaactgcgtcattcctgaaacttgcacaattgacatttaatgaaccgccagagctacttgggttggcaattaacagaacaaacatgaaatactcgccgtcaactagcgcggttgttagaggtgcagaagtctttcctcgcagtttactacggacgcactccatcccctgctgtcctttgtgtctgcgagaaaatggctacgcctcctacctttggcactttcaggggtacgaatactgccacagccataacgtacctttaattaccacttgtagctgtggtaaggagtttgactaccgagtatctgggttaaagggcatttgctgcaaatgcaaggagcctatcaccttaaccagcagggagaacggtcatgaggcagcgtgtactgtttcaaactggcttgctggccatgaatctaaacctctgccaaatcttcctaaaagctaccgatggggtttagttcattggtggatgggtattaaagatagcgagttcgatcacttttcgttcgttcaatttttctcaaactggccaaggtcattccactcgataatcgaagatgaagtagagttcaaccttgagcatgctgttgtcagcacgtctgaattacgactaaaagatcttcttggtcgattgtttttcggttcaattcggttacctgagcggaatcttcaacacaatatcatccttggtgagcttctctgctatttagaaaatcgtttatggcaagacaagggattaatcgccaacctcaaaatgaacgcgttagaggcgactgtaatgttaaattgtagcctcgatcagattgcatcaatggttgaacaacgcatcttgaagccaaatcgaaaaagcaagcccaacagccctcttgatgttaccgattatctatttcatttcggcgatattttctgtctttggttagctgagttccaaagcgatgagtttaaccgttcgttttatgtgtcgaggtggtaaatgcaaactctgaaagaactaatcgcatccaatcctgacgacttaacaactgaacttaagagagcatttcgtccactcacaccgcatattgcaattgatggtaatgaacttgacgcactgacgatattagtcaatttaaccgataagactgatgatcagaaagacctgctcgatcgagccaaatgcaagcaaaaacttcgagatgaaaaatggtgggctagctgcataaattgcgttaattacagacaaagccataacccaaaattcccggatatacgttctgaaggcgtgattcgaacccaagccctgggtgaattaccgagtttcctactctcgtcctcaaaaatcccaccataccattggtcatatagccatgattcaaaatacgtcaacaaaagcgcattcctcaccaatgagttttgttgggatggtgagatctcatgtttgggtgagcttcttaaagatgcagatcacccactttggaatactttgaaaaagttaggttgttctcaaaaaacttgcaaagcaatggcaaaacaactagctgatattactctcacgactatcaatgtcacactcgcaccaaattacctgactcaaatatctctccccgatagtgatacatcctacatttcactctctcctgttgcatcgctatcgatgcaaagccactttcatcagaggctccaagatgaaaatcggcatagcgcgataacgcggtttagccgaactaccaacatgggggtcactgcgatgacatgtggcggcgcatttagaatgttaaagtctggcgctaagttttccagcccccctcatcaccgattaaacagtaaacgaagttggttgacgtcagagcatgttcagtcattaaaacagtaccagcgcctcaacaaaagcctcatacctgaaaactctcggattgcactccgtagaaaatacaaaatcgagcttcaaaatatggtcagatcttggtttgcaatgcaagaccatacccttgattcgaacatacttatccaacatttgaatcatgacctatcttacttaggagccacaaaacgttttgcatacgatccagcgatgaccaagctctttactgagcttttgaaacgagagttatcaaattcaatcaataatggtgagcaacacactaatggatcgtttttagtcctaccgaatatcagggtttgtggcgcaacagctttaagctccccggtaacggtggggattccatcacttacagctttctttggcttcgttcacgcatttgaacggaatataaatcgcaccacctcatcgtttcgtgttgaatcctttgcgatatgcgtccatcaactacatgtcgagaagcgaggtttgacagcagagtttgtggaaaaaggcgacgggactatatccgctcccgcgacccgggatgactggcagtgtgatgtcgtatttagccttattttgaacaccaactttgctcaacatattgaccaagatacgttagttacatcactaccaaagcgattggctcggggttcagcaaaaattgcgattgatgactttaaacatatcaactcattctcgacattagaaacagcgatcgaatctctgccaatagaagctggtaggtggttatcactttacgcacagtcaaacaataatctaagtgatctattagcagccatgacagaggaccatcagctcatggcaagctgcgtcggttaccacttgttagaagagcccaaagataaaccaaactccctcagaggttacaaacacgctatcgccgagtgcatcattggactcattaactcaatcacctttagctcagagactgatcccaacacaatcttttggtcgctaaagaactatcaaaactacctagtggtacagccaaggagtatcaacgatgaaactaccgacaaatctagcctatgagcgctctatcgacccatcagatgtctgtttttttgtcgtctggcccgatgatagaaaaacacctttaacctacaattctcgtactctgctcgggcaaatggaagcggcatcattagcctatgatgtctcaggtcaaccaataaaaagtgccaccgctgaggcgttagctcaagggaaccctcatcaagttgatttctgccacgttccatacggtgcgagtcatattgaatgcagtttctccgtctcgttttcttctgaactacgtcaaccatataagtgtaactcaagcaaagttaaacaaacgctagtgcaattagtcgagctctacgaaacgaaaatcggctggactgagctagcaacccgatatttgatgaacatttgcaacggtaaatggctgtggaaaaatacccgtaaagcctattgctggaacattgtacttacaccttggccttggaacggggaaaaggttggatttgaagatattcgtactaactacacctcacggcaagactttaaaaataataaaaattggtctgctatagttgaaatgatcaaaaccgcattttctagtactgatgggctggcgatatttgaagtcagggccaccttgcacttgccaacgaatgctatggtgcggccaagccaagttttcacagaaaaagaaagtggcagtaaaagtaaatctaaaactcaaaacagtcgagtttttcagagtacaactattgatggtgaacgatcgccaatactaggggcctttaaaacgggagcagctattgcaaccattgacgactggtatcctgaagccactgagccactaagggtcggacggtttggggttcatcgcgaagatgtcacttgctaccgtcatccgtctaccggaaaagattttttctcgatattacaacaagcagagcactatattgaagtgttgagcgccaacaaaactcccgctcaagaaactatcaacgacatgcactttttaatggctaacctgattaagggtgggatgttccagcataaaggagactgactgtgaaatggtattataagacaatcacctttctgccagagttgtgcaacaacgagtcactggctgcaaagtgtctccgcgttctgcatggatttaactatcagtatgagacacgaaatatcggcgtttcatttccgctttggtgtgatgcaacggttggaaaaaagatttcatttgtcagcaagaacaagatagaactcgacttactacttaaacaacactatttcgtccaaatggaacaacttcaatactttcatatatccaacactgttctcgtcccagaagattgtacatacgtttcctttagacgctgtcaatctatagataagctcacagcagcagggctggcaaggaaaatcagacgcctggagaaacgtgctctatctagaggcgagcaatttgacccatcatcttttgctcaaaaagagcatactgcaatagcgcactaccactcacttggggagtccagcaaacagacgaaccgcaactttcgactcaatatcaggatgctctcggagcaaccccgtgaggggaactcgatttttagtagctatggcttatcaaattcagaaaactcgtttcagcctgtacccttaatctgacctttaataaggagatataccatggcgacaagtttacctacgccctcagcaattacgacttcggcgttagagtatgcattccatactcccgctcgcaatctaacgaaatctcgcggaaaaaacattcatcgttatgtcagtgtaaagatgagtaagaggattacggtagaatctactctagagtgtgatgcctgctatcactttgattttgagccaagtattgttcgcttttgcgctcaaccgattcgatttttatattatctcaatggtcagtctcactcctatgttcctgactttctagttcaatttgataccaacgagtttgttctatatgaagtaaagtcagcttatgctaagaacaaacctgattttgatgttgaatgggaggcgaaagtaaaagcagcaactgaactagggctagaattggagcttgttgaagagagtgatattagggatacggttgtattaaataatcttaagcgcatgcatcgttatgcttcgaaagatgagctgaataacgtacataactctctcttaaaaataataaagtacaatggcgcccaatctgcaagatgcttgggagaacagttgggtttaaaaggccgaactgttttaccaattttgtgcgatttgctgtcaaggtgtttactcgatacacgtttggataagcctctatctcttgaatctcgatttgagttggccagttatggctaagaaagggttctcaagtttccatagaaaagcagtctcttcccaagatacgcttgaatcgatagagcttgtctctagcgctaattgtctagaaagtgttacgtatcaagatatatcagcatttcccgaaacaattgcggtagagattaatttccgattaagcattcttcgctttttagcgcgaaagtgcgaaaccattgtggccaaatcaattgaaccacatcgtgtagagctacagcaaaactatagtagaaaaatacccagtgcaataacgatatatcgatggtggcttgcttttcgaaaatcagactacaaccccattagcttagcacctaatatcaaggatagaggtaatagagagacaaaagtgtcaacagttgttgattctattatggaacaggcagttgaaagagttatatctggacgaaaagtcaatgttagctctgcatataaacgtgttcgacgaaaagttcgtcaatacaatctaactcatggaacgaaatacacgtatcctaagtacgaatctgtaagaaagcgagtaaaaaagaaaaccccatttgagttattagccgcagggaaaggggagagagtagctaagagagagtttcgccgaatgggaaaaaagatcctcacgtctagcgtgctagagagggttgaaatagatcacactgtcgttgacctttttgcagtacacgaagagtatcgaatcccattgggccgaccttggcttactcaattggttgattgttacagtaaagctgtaatcggtttttatttaggtttcgagcctcctagctatgtgtcggtttcccttgcacttaagaatgcaatacaacgcaaagatgacttaatctcctcgtatgaatcgatcgagaatgaatggctatgttatggcatcccagacctactcgtaactgataatggtaaagagtttttgtcgaaagcatttgatcaagcatgtgaatcactattgatcaatgtgcatcaaaataaagttgagacgcccgacaacaaacctcatgttgaacgtaactacgggactattaatacttctctgttagacgatttacctgggaaatccttcagccagtaccttcaaagagaagggtacgactctgtgggagaagctacccttacactcaatgagattagagaaatttacttaatttggttggtggatatttatcataaaaaacccaatcagagaggcactaattgtcctaatgttgcgtggaaaaagggttgtcaagaatgggaaccagaggagttctctggttctaaagacgaattagactttaaatttgctattgttgattacaaacaacttactaaagtagggataactgtctacaaagaactgagttatagcaatgaccgtttagctgaatatagagggaagaaaggaaaccataaagttcagttcaagtataaccctgagtgtatggcagttatttgggtgttggatgaggatatgaatgagtactttacagttaatgcgattgactacgaatatgcaagtagagtatcactttggcaacataaatataacatgaaatatcaagcagaactaaattcagcagaatatgatgaggacaaggaaattgatgcagaaataaaaattgaagaaatcgcagatcgttcaattgttaagactaacaaaatcagagctcggaggcgtggcgctaggcatcaagagaatagcgcaagggctaagtcaatcagtaatgcgaacccggcctcgatacaaaaacatgaagatgaaatcgttagtgcagataatgacgattgggatattgattatgtctgagaaatcgtcaaatgagtgaaacgcgtgaggctcgtatatcaagagctaaaagggcatttgtatccacaccgagcgttaggaaaatcttgagttacatggatagatgtagagatctatcagacctagagtctgagcctacatgcatgatggtctatggtgcttcgggtgtaggtaaaacgaccgtcatcaagaaatacttaaatcaaaacagaagagagtccgaagccgggggcgatataataccggttttgcatattgagttgccagacaatgcgaagccagtagatgcagcaagggaattgctggttgaaatgggtgacccgctagcactttatgaaactgacttagctagattgacgaaaagactgactgaattaatccctgcggtcggcgtgaagctgattattatcgatgagttccaacatttggtggaagaaaggtcaaatcgggttcttacccaagtaggtaattggctaaaaatgatacttaacaaaacgaaatgtccaattgttatatttggtatgccatactcaaaagttgtactgcaagcaaactcgcaacttcacgggcgattttccattcaggttgaactgcgcccctttagctaccagggaggtagaggtgtatttaaaacttttttggaataccttgataaagccctaccttttgaaaaacaggctggcttagccaacgaaagtttgcagaaaaaattgtatgcattctctcagggaaacatgcgttcgttgagaaaccttatttatcaagcatctatcgaagcaattgataatcagcatgagacgataaccgaagaagatttcgtttttgcatcgaagttgacatcgggcgataaacccaactcatggaaaaatccttttgaggagggtgttgaggtaacagaagatatgttacgaccgccaccaaaagatattggttgggaggactatttgagacattcaaccccgagagtgagtaaaccaggtagaaataaaaactttttcgaataacctaggctgctgcgctgctgccaccgctgagcaataactagcataaccccttggggcctctaaacgggtcttgaggggttttttgctgaaacctcaggcatgttggaacaaccataaaatgataattacacccataaattgataattatcacacccataaattgatattgcctcttcatggtctaaacttcagtaagtttacgacattttcatgaagaggtcatttccggggatccatggagaaaaaaatcactggatataccaccgttgatatatcccaatggcatcgtaaagaacattttgaggcatttcagtcagttgctcaatgtacctataaccagaccgttcagctggatattacggcctttttaaagaccgtaaagaaaaataagcacaagttttatccggcctttattcacattcttgcccgcctgatgaatgctcatccggagttccgtatggcaatgaaagacggtgagctggtgatatgggatagtgttcacccttgttacaccgttttccatgagcaaactgaaacgttttcatcgctctggagtgaataccacgacgatttccggcagtttctacacatatattcgcaagatgtggcgtgttacggtgaaaacctggcctatttccctaaagggtttattgagaatatgtttttcgtctcagccaatccctgggtgagtttcaccagttttgatttaaacgtggccaatatggacaacttcttcgcccccgttttcactatgggcaaatattatacgcaaggcgacaaggtgctgatgccgctggcgattcaggttcatcatgccgtttgtgatggcttccatgtcggcagaatgcttaatgaattacaacagtactgcgatgagtggcagggcggggcgtaatttttttaaggcagttattggtgcccttctagagtccttactgcagtagttttgctgaaatactcgattcacaaaaatatcaacttatggttgttttgtgagatatcaatatatggttgttttgtggttaagttgctgattataaataattattaaatatcactttatggttgcatcaacaggtaccgagctcgaattcactggccgtcgttttacaacgtcgtgactgggaaaaccctggcgttacccaacttaatcgccttgcggccagtttgctcaggctctccccgtggaggtaataattgacgatatgatcatttattctgcctcccagagcctgataaaaacggtgaatccgttagcgaggtgccgccggcttccattcaggtcgaggtggcccggctccatgcaccgcgacgcaacgcggggaggcagacaaggtatagggcggcgaggcggctacagccgatagtctggaacagcgcacttacgggttgctgcgcaacccaagtgctaccggcgcggcagcgtgacccgtgtcggcggctccaacggctcgccatcgtccagaaaacacggctcatcgggcatcggcaggcgctgctgcccgcgccgttcccattcctccgtttcggtcaaggctggcaggtctggttccatgcccggaatgccgggctggctgggcggctcctcgccggggccggtcggtagttgctgctcgcccggatacagggtcgggatgcggcgcaggtcgccatgccccaacagcgattcgtcctggtcgtcgtgatcaaccaccacggcggcactgaacaccgacaggcgcaactggtcgcggggctggccccacgccacgcggtcattgaccacgtaggccgacacggtgccggggccgttgagcttcacgacggagatccagcgctcggccaccaagtccttgactgcgtattggaccgtccgcaaagaacgtccgatgagcttggaaagtgtcttctggctgaccaccacggcgttctggtggcccatctgcgccacgaggtgatgcagcagcattg

SEQ ID NO: 103 - DNA, 14028 bp, artificial sequence
  Synthetic
ccgccgtgggtttcctcgcaataagcccggcccacgcctcatgcgctttgcgttccgtttgcacccagtgaccgggcttgttcttggcttgaatgccgatttctctggactgcgtggccatgcttatctccatgcggtaggggtgccgcacggttgcggcaccatgcgcaatcagctgcaacttttcggcagcgcgacaacaattatgcgttgcgtaaaagtggcagtcaattacagattttctttaacctacgcaatgagctattgcggggggtgccgcaatgagctgttgcgtaccccccttttttaagttgttgatttttaagtctttcgcatttcgccctatatctagttctttggtgcccaaagaagggcacccctgcggggttcccccacgccttcggcgcggctccccctccggcaaaaagtggcccctccggggcttgttgatcgactgcgcggccttcggccttgcccaaggtggcgctgcccccttggaacccccgcactcgccgccgtgaggctcggggggcaggcgggcgggcttcgcccttcgactgcccccactcgcataggcttgggtcgttccaggcgcgtcaaggccaagccgctgcgcggtcgctgcgcgagccttgacccgccttccacttggtgtccaaccggcaagcgaagcgcgcaggccgcaggccggaggcttttccccagagaaaattaaaaaaattgatggggcaaggccgcaggccgcgcagttggagccggtgggtatgtggtcgaaggctgggtagccggtgggcaatccctgtggtcaagctcgtgggcaggcgcagcctgtccatcagcttgtccagcagggttgtccacgggccgagcgaagcgagccagccggtggccgctcgcggccatcgtccacatatccacgggctggcaagggagcgcagcgaccgcgcagggcgaagcccggagagcaagcccgtagggcgccgcagccgccgtaggcggtcacgactttgcgaagcaaagtctagtgagtatactcaagcattgagtggcccgccggaggcaccgccttgcgctgcccccgtcgagccggttggacaccaaaagggaggggcaggcatggcggcatacgcgatcatgcgatgcaagaagctggcgaaaatgggcaacgtggcggccagtctcaagcacgcctaccgcgagcgcgagacgcccaacgctgacgccagcaggacgccagagaacgagcactgggcggccagcagcaccgatgaagcgatgggccgactgcgcgagttgctgccagagaagcggcgcaaggacgctgtgttggcggtcgagtacgtcatgacggccagcccggaatggtggaagtcggccagccaagaacagcaggcggcgttcttcgagaaggcgcacaagtggctggcggacaagtacggggcggatcgcatcgtgacggccagcatccaccgtgacgaaaccagcccgcacatgaccgcgttcgtggtgccgctgacgcaggacggcaggctgtcggccaaggagttcatcggcaacaaagcgcagatgacccgcgaccagaccacgtttgcggccgctgtggccgatctagggctgcaacggggcatcgagggcagcaaggcacgtcacacgcgcattcaggcgttctacgaggccctggagcggccaccagtgggccacgtcaccatcagcccgcaagcggtcgagccacgcgcctatgcaccgcagggattggccgaaaagctgggaatctcaaagcgcgttgagacgccggaagccgtggccgaccggctgacaaaagcggttcggcaggggtatgagcctgccctacaggccgccgcaggagcgcgtgagatgcgcaagaaggccgatcaagcccaagagacggcccgtgaccttcgggagcgcctgaagcccgttctggacgccctggggccgttgaatcgggatatgcaggccaaggccgccgcgatcatcaaggccgtgggcgaaaagctgctgacggaacagcgggaagtccagcgccagaaacaggcccagcgccagcaggaacgcgggcgcgcacatttccccgaaaagtgccacctgggatgaatgtcagctactgggctatctggacaagggaaaacgcaagcgcaaagagaaagcaggtagcttgcagtgggcttacatggcgatagctagactgggcggttttatggacagcaagcgaaccggaattgccagctggggcgccctctggtaaggttgggaagccctgcaaagtaaactggatggctttcttgccgccaaggatctgatggcgcaggggatcaagatctgatcaagagacaggatgaggatcgtttcgcatgattgaacaagatggattgcacgcaggttctccggccgcttgggtggagaggctattcggctatgactgggcacaacagacaatcggctgctctgatgccgccgtgttccggctgtcagcgcaggggcgcccggttctttttgtcaagaccgacctgtccggtgccctgaatgaactgcaagacgaggcagcgcggctatcgtggctggccacgacgggcgttccttgcgcagctgtgctcgacgttgtcactgaagcgggaagggactggctgctattgggcgaagtgccggggcaggatctcctgtcatctcaccttgctcctgccgagaaagtatccatcatggctgatgcaatgcggcggctgcatacgcttgatccggctacctgcccattcgaccaccaagcgaaacatcgcatcgagcgagcacgtactcggatggaagccggtcttgtcgatcaggatgatctggacgaagagcatcaggggctcgcgccagccgaactgttcgccaggctcaaggcgcgcatgcccgacggcgaggatctcgtcgtgacccatggcgatgcctgcttgccgaatatcatggtggaaaatggccgcttttctggattcatcgactgtggccggctgggtgtggcggaccgctatcaggacatagcgttggctacccgtgatattgctgaagagcttggcggcgaatgggctgaccgcttcctcgtgctttacggtatcgccgctcccgattcgcagcgcatcgccttctatcgccttcttgacgagttcttctgagcgggactctggggttcgaaatgaccgaccaagcgacgcccaacctgccatcacgagatttcgattccaccgccgccttctatgaaaggttgggcttcggaatcgttttccgggacgccggctggatgatcctccagcgcggggatctcatgctggagttcttcgcccacccccatgggcaaatattatacgcaaggcgacaaggtgctgatgccgctggcgattcaggttcatcatgccgtttgtgatggcttccatgtcggcagaatgcttaatgaattacaacagtttttatgcatgcgcccaatacgcaaaccgcctctccccgcgcgttggccgattcattaatgcagctggcacgacaggtttcccgactggtggataaccgtattaccgcctttgagtgagctgataccgctcgccgcagccgaacgaccgagcgcagcgagtcagtgagcgaggacacaagctttgacagctagctcagtcctaggtataatactagcgtcgacgtggagatataccatgggtgaactgccgagtaggtagctgataacaatcagaccgatgaattctctctcgactcgccgtgaactgccgagtaggtagctgataacggatccgaattcgagcgaaggagatatacatatgtttttgcaaagacctaaaccttacagcgatgaaagtttagaaagtttctttatccgagtggctaacaaaaatggctacggtgatgtccatcgcttcctagaagccactaaacgattccttcaagacattgaccataatggctatcaaacctttccgactgatataactcggataaacccatactcagctaaaaacagttccagcgcacgaactgcgtcattcctgaaacttgcacaattgacatttaatgaaccgccagagctacttgggttggcaattaacagaacaaacatgaaatactcgccgtcaactagcgcggttgttagaggtgcagaagtctttcctcgcagtttactacggacgcactccatcccctgctgtcctttgtgtctgcgagaaaatggctacgcctcctacctttggcactttcaggggtacgaatactgccacagccataacgtacctttaattaccacttgtagctgtggtaaggagtttgactaccgagtatctgggttaaagggcatttgctgcaaatgcaaggagcctatcaccttaaccagcagggagaacggtcatgaggcagcgtgtactgtttcaaactggcttgctggccatgaatctaaacctctgccaaatcttcctaaaagctaccgatggggtttagttcattggtggatgggtattaaagatagcgagttcgatcacttttcgttcgttcaatttttctcaaactggccaaggtcattccactcgataatcgaagatgaagtagagttcaaccttgagcatgctgttgtcagcacgtctgaattacgactaaaagatcttcttggtcgattgtttttcggttcaattcggttacctgagcggaatcttcaacacaatatcatccttggtgagcttctctgctatttagaaaatcgtttatggcaagacaagggattaatcgccaacctcaaaatgaacgcgttagaggcgactgtaatgttaaattgtagcctcgatcagattgcatcaatggttgaacaacgcatcttgaagccaaatcgaaaaagcaagcccaacagccctcttgatgttaccgattatctatttcatttcggcgatattttctgtctttggttagctgagttccaaagcgatgagtttaaccgttcgttttatgtgtcgaggtggtaaatgcaaactctgaaagaactaatcgcatccaatcctgacgacttaacaactgaacttaagagagcatttcgtccactcacaccgcatattgcaattgatggtaatgaacttgacgcactgacgatattagtcaatttaaccgataagactgatgatcagaaagacctgctcgatcgagccaaatgcaagcaaaaacttcgagatgaaaaatggtgggctagctgcataaattgcgttaattacagacaaagccataacccaaaattcccggatatacgttctgaaggcgtgattcgaacccaagccctgggtgaattaccgagtttcctactctcgtcctcaaaaatcccaccataccattggtcatatagccatgattcaaaatacgtcaacaaaagcgcattcctcaccaatgagttttgttgggatggtgagatctcatgtttgggtgagcttcttaaagatgcagatcacccactttggaatactttgaaaaagttaggttgttctcaaaaaacttgcaaagcaatggcaaaacaactagctgatattactctcacgactatcaatgtcacactcgcaccaaattacctgactcaaatatctctccccgatagtgatacatcctacatttcactctctcctgttgcatcgctatcgatgcaaagccactttcatcagaggctccaagatgaaaatcggcatagcgcgataacgcggtttagccgaactaccaacatgggggtcactgcgatgacatgtggcggcgcatttagaatgttaaagtctggcgctaagttttccagcccccctcatcaccgattaaacagtaaacgaagttggttgacgtcagagcatgttcagtcattaaaacagtaccagcgcctcaacaaaagcctcatacctgaaaactctcggattgcactccgtagaaaatacaaaatcgagcttcaaaatatggtcagatcttggtttgcaatgcaagaccatacccttgattcgaacatacttatccaacatttgaatcatgacctatcttacttaggagccacaaaacgttttgcatacgatccagcgatgaccaagctctttactgagcttttgaaacgagagttatcaaattcaatcaataatggtgagcaacacactaatggatcgtttttagtcctaccgaatatcagggtttgtggcgcaacagctttaagctccccggtaacggtggggattccatcacttacagctttctttggcttcgttcacgcatttgaacggaatataaatcgcaccacctcatcgtttcgtgttgaatcctttgcgatatgcgtccatcaactacatgtcgagaagcgaggtttgacagcagagtttgtggaaaaaggcgacgggactatatccgctcccgcgacccgggatgactggcagtgtgatgtcgtatttagccttattttgaacaccaactttgctcaacatattgaccaagatacgttagttacatcactaccaaagcgattggctcggggttcagcaaaaattgcgattgatgactttaaacatatcaactcattctcgacattagaaacagcgatcgaatctctgccaatagaagctggtaggtggttatcactttacgcacagtcaaacaataatctaagtgatctattagcagccatgacagaggaccatcagctcatggcaagctgcgtcggttaccacttgttagaagagcccaaagataaaccaaactccctcagaggttacaaacacgctatcgccgagtgcatcattggactcattaactcaatcacctttagctcagagactgatcccaacacaatcttttggtcgctaaagaactatcaaaactacctagtggtacagccaaggagtatcaacgatgaaactaccgacaaatctagcctatgagcgctctatcgacccatcagatgtctgtttttttgtcgtctggcccgatgatagaaaaacacctttaacctacaattctcgtactctgctcgggcaaatggaagcggcatcattagcctatgatgtctcaggtcaaccaataaaaagtgccaccgctgaggcgttagctcaagggaaccctcatcaagttgatttctgccacgttccatacggtgcgagtcatattgaatgcagtttctccgtctcgttttcttctgaactacgtcaaccatataagtgtaactcaagcaaagttaaacaaacgctagtgcaattagtcgagctctacgaaacgaaaatcggctggactgagctagcaacccgatatttgatgaacatttgcaacggtaaatggctgtggaaaaatacccgtaaagcctattgctggaacattgtacttacaccttggccttggaacggggaaaaggttggatttgaagatattcgtactaactacacctcacggcaagactttaaaaataataaaaattggtctgctatagttgaaatgatcaaaaccgcattttctagtactgatgggctggcgatatttgaagtcagggccaccttgcacttgccaacgaatgctatggtgcggccaagccaagttttcacagaaaaagaaagtggcagtaaaagtaaatctaaaactcaaaacagtcgagtttttcagagtacaactattgatggtgaacgatcgccaatactaggggcctttaaaacgggagcagctattgcaaccattgacgactggtatcctgaagccactgagccactaagggtcggacggtttggggttcatcgcgaagatgtcacttgctaccgtcatccgtctaccggaaaagattttttctcgatattacaacaagcagagcactatattgaagtgttgagcgccaacaaaactcccgctcaagaaactatcaacgacatgcactttttaatggctaacctgattaagggtgggatgttccagcataaaggagactgactgtgaaatggtattataagacaatcacctttctgccagagttgtgcaacaacgagtcactggctgcaaagtgtctccgcgttctgcatggatttaactatcagtatgagacacgaaatatcggcgtttcatttccgctttggtgtgatgcaacggttggaaaaaagatttcatttgtcagcaagaacaagatagaactcgacttactacttaaacaacactatttcgtccaaatggaacaacttcaatactttcatatatccaacactgttctcgtcccagaagattgtacatacgtttcctttagacgctgtcaatctatagataagctcacagcagcagggctggcaaggaaaatcagacgcctggagaaacgtgctctatctagaggcgagcaatttgacccatcatcttttgctcaaaaagagcatactgcaatagcgcactaccactcacttggggagtccagcaaacagacgaaccgcaactttcgactcaatatcaggatgctctcggagcaaccccgtgaggggaactcgatttttagtagctatggcttatcaaattcagaaaactcgtttcagcctgtacccttaatctgacctttaataaggagatataccatggcgacaagtttacctacgccctcagcaattacgacttcggcgttagagtatgcattccatactcccgctcgcaatctaacgaaatctcgcggaaaaaacattcatcgttatgtcagtgtaaagatgagtaagaggattacggtagaatctactctagagtgtgatgcctgctatcactttgattttgagccaagtattgttcgcttttgcgctcaaccgattcgatttttatattatctcaatggtcagtctcactcctatgttcctgactttctagttcaatttgataccaacgagtttgttctatatgaagtaaagtcagcttatgctaagaacaaacctgattttgatgttgaatgggaggcgaaagtaaaagcagcaactgaactagggctagaattggagcttgttgaagagagtgatattagggatacggttgtattaaataatcttaagcgcatgcatcgttatgcttcgaaagatgagctgaataacgtacataactctctcttaaaaataataaagtacaatggcgcccaatctgcaagatgcttgggagaacagttgggtttaaaaggccgaactgttttaccaattttgtgcgatttgctgtcaaggtgtttactcgatacacgtttggataagcctctatctcttgaatctcgatttgagttggccagttatggctaagaaagggttctcaagtttccatagaaaagcagtctcttcccaagatacgcttgaatcgatagagcttgtctctagcgctaattgtctagaaagtgttacgtatcaagatatatcagcatttcccgaaacaattgcggtagagattaatttccgattaagcattcttcgctttttagcgcgaaagtgcgaaaccattgtggccaaatcaattgaaccacatcgtgtagagctacagcaaaactatagtagaaaaatacccagtgcaataacgatatatcgatggtggcttgcttttcgaaaatcagactacaaccccattagcttagcacctaatatcaaggatagaggtaatagagagacaaaagtgtcaacagttgttgattctattatggaacaggcagttgaaagagttatatctggacgaaaagtcaatgttagctctgcatataaacgtgttcgacgaaaagttcgtcaatacaatctaactcatggaacgaaatacacgtatcctaagtacgaatctgtaagaaagcgagtaaaaaagaaaaccccatttgagttattagccgcagggaaaggggagagagtagctaagagagagtttcgccgaatgggaaaaaagatcctcacgtctagcgtgctagagagggttgaaatagatcacactgtcgttgacctttttgcagtacacgaagagtatcgaatcccattgggccgaccttggcttactcaattggttgattgttacagtaaagctgtaatcggtttttatttaggtttcgagcctcctagctatgtgtcggtttcccttgcacttaagaatgcaatacaacgcaaagatgacttaatctcctcgtatgaatcgatcgagaatgaatggctatgttatggcatcccagacctactcgtaactgataatggtaaagagtttttgtcgaaagcatttgatcaagcatgtgaatcactattgatcaatgtgcatcaaaataaagttgagacgcccgacaacaaacctcatgttgaacgtaactacgggactattaatacttctctgttagacgatttacctgggaaatccttcagccagtaccttcaaagagaagggtacgactctgtgggagaagctacccttacactcaatgagattagagaaatttacttaatttggttggtggatatttatcataaaaaacccaatcagagaggcactaattgtcctaatgttgcgtggaaaaagggttgtcaagaatgggaaccagaggagttctctggttctaaagacgaattagactttaaatttgctattgttgattacaaacaacttactaaagtagggataactgtctacaaagaactgagttatagcaatgaccgtttagctgaatatagagggaagaaaggaaaccataaagttcagttcaagtataaccctgagtgtatggcagttatttgggtgttggatgaggatatgaatgagtactttacagttaatgcgattgactacgaatatgcaagtagagtatcactttggcaacataaatataacatgaaatatcaagcagaactaaattcagcagaatatgatgaggacaaggaaattgatgcagaaataaaaattgaagaaatcgcagatcgttcaattgttaagactaacaaaatcagagctcggaggcgtggcgctaggcatcaagagaatagcgcaagggctaagtcaatcagtaatgcgaacccggcctcgatacaaaaacatgaagatgaaatcgttagtgcagataatgacgattgggatattgattatgtctgagaaatcgtcaaatgagtgaaacgcgtgaggctcgtatatcaagagctaaaagggcatttgtatccacaccgagcgttaggaaaatcttgagttacatggatagatgtagagatctatcagacctagagtctgagcctacatgcatgatggtctatggtgcttcgggtgtaggtaaaacgaccgtcatcaagaaatacttaaatcaaaacagaagagagtccgaagccgggggcgatataataccggttttgcatattgagttgccagacaatgcgaagccagtagatgcagcaagggaattgctggttgaaatgggtgacccgctagcactttatgaaactgacttagctagattgacgaaaagactgactgaattaatccctgcggtcggcgtgaagctgattattatcgatgagttccaacatttggtggaagaaaggtcaaatcgggttcttacccaagtaggtaattggctaaaaatgatacttaacaaaacgaaatgtccaattgttatatttggtatgccatactcaaaagttgtactgcaagcaaactcgcaacttcacgggcgattttccattcaggttgaactgcgcccctttagctaccagggaggtagaggtgtatttaaaacttttttggaataccttgataaagccctaccttttgaaaaacaggctggcttagccaacgaaagtttgcagaaaaaattgtatgcattctctcagggaaacatgcgttcgttgagaaaccttatttatcaagcatctatcgaagcaattgataatcagcatgagacgataaccgaagaagatttcgtttttgcatcgaagttgacatcgggcgataaacccaactcatggaaaaatccttttgaggagggtgttgaggtaacagaagatatgttacgaccgccaccaaaagatattggttgggaggactatttgagacattcaaccccgagagtgagtaaaccaggtagaaataaaaactttttcgaataacctaggctgctgcgctgctgccaccgctgagcaataactagcataaccccttggggcctctaaacgggtcttgaggggttttttgctgaaacctcaggcatgttggaacaaccataaaatgataattacacccataaattgataattatcacacccataaattgatattgcctcttcatggtctaaacttcagtaagtttacgacattttcatgaagaggtcatttccggggatccatggagaaaaaaatcactggatataccaccgttgatatatcccaatggcatcgtaaagaacattttgaggcatttcagtcagttgctcaatgtacctataaccagaccgttcagctggatattacggcctttttaaagaccgtaaagaaaaataagcacaagttttatccggcctttattcacattcttgcccgcctgatgaatgctcatccggagttccgtatggcaatgaaagacggtgagctggtgatatgggatagtgttcacccttgttacaccgttttccatgagcaaactgaaacgttttcatcgctctggagtgaataccacgacgatttccggcagtttctacacatatattcgcaagatgtggcgtgttacggtgaaaacctggcctatttccctaaagggtttattgagaatatgtttttcgtctcagccaatccctgggtgagtttcaccagttttgatttaaacgtggccaatatggacaacttcttcgcccccgttttcactatgggcaaatattatacgcaaggcgacaaggtgctgatgccgctggcgattcaggttcatcatgccgtttgtgatggcttccatgtcggcagaatgcttaatgaattacaacagtactgcgatgagtggcagggcggggcgtaatttttttaaggcagttattggtgcccttctagagtccttactgcagtagttttgctgaaatactcgattcacaaaaatatcaacttatggttgttttgtgagatatcaatatatggttgttttgtggttaagttgctgattataaataattattaaatatcactttatggttgcatcaacaggtaccgagctcgaattcactggccgtcgttttacaacgtcgtgactgggaaaaccctggcgttacccaacttaatcgccttgcggccagtttgctcaggctctccccgtggaggtaataattgacgatatgatcatttattctgcctcccagagcctgataaaaacggtgaatccgttagcgaggtgccgccggcttccattcaggtcgaggtggcccggctccatgcaccgcgacgcaacgcggggaggcagacaaggtatagggcggcgaggcggctacagccgatagtctggaacagcgcacttacgggttgctgcgcaacccaagtgctaccggcgcggcagcgtgacccgtgtcggcggctccaacggctcgccatcgtccagaaaacacggctcatcgggcatcggcaggcgctgctgcccgcgccgttcccattcctccgtttcggtcaaggctggcaggtctggttccatgcccggaatgccgggctggctgggcggctcctcgccggggccggtcggtagttgctgctcgcccggatacagggtcgggatgcggcgcaggtcgccatgccccaacagcgattcgtcctggtcgtcgtgatcaaccaccacggcggcactgaacaccgacaggcgcaactggtcgcggggctggccccacgccacgcggtcattgaccacgtaggccgacacggtgccggggccgttgagcttcacgacggagatccagcgctcggccaccaagtccttgactgcgtattggaccgtccgcaaagaacgtccgatgagcttggaaagtgtcttctggctgaccaccacggcgttctggtggcccatctgcgccacgaggtgatgcagcagcattg

SEQ ID NO: 104 - DNA, 14028 bp, artificial sequence
  Synthetic
ccgccgtgggtttcctcgcaataagcccggcccacgcctcatgcgctttgcgttccgtttgcacccagtgaccgggcttgttcttggcttgaatgccgatttctctggactgcgtggccatgcttatctccatgcggtaggggtgccgcacggttgcggcaccatgcgcaatcagctgcaacttttcggcagcgcgacaacaattatgcgttgcgtaaaagtggcagtcaattacagattttctttaacctacgcaatgagctattgcggggggtgccgcaatgagctgttgcgtaccccccttttttaagttgttgatttttaagtctttcgcatttcgccctatatctagttctttggtgcccaaagaagggcacccctgcggggttcccccacgccttcggcgcggctccccctccggcaaaaagtggcccctccggggcttgttgatcgactgcgcggccttcggccttgcccaaggtggcgctgcccccttggaacccccgcactcgccgccgtgaggctcggggggcaggcgggcgggcttcgcccttcgactgcccccactcgcataggcttgggtcgttccaggcgcgtcaaggccaagccgctgcgcggtcgctgcgcgagccttgacccgccttccacttggtgtccaaccggcaagcgaagcgcgcaggccgcaggccggaggcttttccccagagaaaattaaaaaaattgatggggcaaggccgcaggccgcgcagttggagccggtgggtatgtggtcgaaggctgggtagccggtgggcaatccctgtggtcaagctcgtgggcaggcgcagcctgtccatcagcttgtccagcagggttgtccacgggccgagcgaagcgagccagccggtggccgctcgcggccatcgtccacatatccacgggctggcaagggagcgcagcgaccgcgcagggcgaagcccggagagcaagcccgtagggcgccgcagccgccgtaggcggtcacgactttgcgaagcaaagtctagtgagtatactcaagcattgagtggcccgccggaggcaccgccttgcgctgcccccgtcgagccggttggacaccaaaagggaggggcaggcatggcggcatacgcgatcatgcgatgcaagaagctggcgaaaatgggcaacgtggcggccagtctcaagcacgcctaccgcgagcgcgagacgcccaacgctgacgccagcaggacgccagagaacgagcactgggcggccagcagcaccgatgaagcgatgggccgactgcgcgagttgctgccagagaagcggcgcaaggacgctgtgttggcggtcgagtacgtcatgacggccagcccggaatggtggaagtcggccagccaagaacagcaggcggcgttcttcgagaaggcgcacaagtggctggcggacaagtacggggcggatcgcatcgtgacggccagcatccaccgtgacgaaaccagcccgcacatgaccgcgttcgtggtgccgctgacgcaggacggcaggctgtcggccaaggagttcatcggcaacaaagcgcagatgacccgcgaccagaccacgtttgcggccgctgtggccgatctagggctgcaacggggcatcgagggcagcaaggcacgtcacacgcgcattcaggcgttctacgaggccctggagcggccaccagtgggccacgtcaccatcagcccgcaagcggtcgagccacgcgcctatgcaccgcagggattggccgaaaagctgggaatctcaaagcgcgttgagacgccggaagccgtggccgaccggctgacaaaagcggttcggcaggggtatgagcctgccctacaggccgccgcaggagcgcgtgagatgcgcaagaaggccgatcaagcccaagagacggcccgtgaccttcgggagcgcctgaagcccgttctggacgccctggggccgttgaatcgggatatgcaggccaaggccgccgcgatcatcaaggccgtgggcgaaaagctgctgacggaacagcgggaagtccagcgccagaaacaggcccagcgccagcaggaacgcgggcgcgcacatttccccgaaaagtgccacctgggatgaatgtcagctactgggctatctggacaagggaaaacgcaagcgcaaagagaaagcaggtagcttgcagtgggcttacatggcgatagctagactgggcggttttatggacagcaagcgaaccggaattgccagctggggcgccctctggtaaggttgggaagccctgcaaagtaaactggatggctttcttgccgccaaggatctgatggcgcaggggatcaagatctgatcaagagacaggatgaggatcgtttcgcatgattgaacaagatggattgcacgcaggttctccggccgcttgggtggagaggctattcggctatgactgggcacaacagacaatcggctgctctgatgccgccgtgttccggctgtcagcgcaggggcgcccggttctttttgtcaagaccgacctgtccggtgccctgaatgaactgcaagacgaggcagcgcggctatcgtggctggccacgacgggcgttccttgcgcagctgtgctcgacgttgtcactgaagcgggaagggactggctgctattgggcgaagtgccggggcaggatctcctgtcatctcaccttgctcctgccgagaaagtatccatcatggctgatgcaatgcggcggctgcatacgcttgatccggctacctgcccattcgaccaccaagcgaaacatcgcatcgagcgagcacgtactcggatggaagccggtcttgtcgatcaggatgatctggacgaagagcatcaggggctcgcgccagccgaactgttcgccaggctcaaggcgcgcatgcccgacggcgaggatctcgtcgtgacccatggcgatgcctgcttgccgaatatcatggtggaaaatggccgcttttctggattcatcgactgtggccggctgggtgtggcggaccgctatcaggacatagcgttggctacccgtgatattgctgaagagcttggcggcgaatgggctgaccgcttcctcgtgctttacggtatcgccgctcccgattcgcagcgcatcgccttctatcgccttcttgacgagttcttctgagcgggactctggggttcgaaatgaccgaccaagcgacgcccaacctgccatcacgagatttcgattccaccgccgccttctatgaaaggttgggcttcggaatcgttttccgggacgccggctggatgatcctccagcgcggggatctcatgctggagttcttcgcccacccccatgggcaaatattatacgcaaggcgacaaggtgctgatgccgctggcgattcaggttcatcatgccgtttgtgatggcttccatgtcggcagaatgcttaatgaattacaacagtttttatgcatgcgcccaatacgcaaaccgcctctccccgcgcgttggccgattcattaatgcagctggcacgacaggtttcccgactggtggataaccgtattaccgcctttgagtgagctgataccgctcgccgcagccgaacgaccgagcgcagcgagtcagtgagcgaggacacaagctttgacagctagctcagtcctaggtataatactagcgtcgacgtggagatataccatgggtgaactgccgagtaggtagctgataacgaaagcgctttccggtggtcagcgtcagcgcggtgaactgccgagtaggtagctgataacggatccgaattcgagcgaaggagatatacatatgtttttgcaaagacctaaaccttacagcgatgaaagtttagaaagtttctttatccgagtggctaacaaaaatggctacggtgatgtccatcgcttcctagaagccactaaacgattccttcaagacattgaccataatggctatcaaacctttccgactgatataactcggataaacccatactcagctaaaaacagttccagcgcacgaactgcgtcattcctgaaacttgcacaattgacatttaatgaaccgccagagctacttgggttggcaattaacagaacaaacatgaaatactcgccgtcaactagcgcggttgttagaggtgcagaagtctttcctcgcagtttactacggacgcactccatcccctgctgtcctttgtgtctgcgagaaaatggctacgcctcctacctttggcactttcaggggtacgaatactgccacagccataacgtacctttaattaccacttgtagctgtggtaaggagtttgactaccgagtatctgggttaaagggcatttgctgcaaatgcaaggagcctatcaccttaaccagcagggagaacggtcatgaggcagcgtgtactgtttcaaactggcttgctggccatgaatctaaacctctgccaaatcttcctaaaagctaccgatggggtttagttcattggtggatgggtattaaagatagcgagttcgatcacttttcgttcgttcaatttttctcaaactggccaaggtcattccactcgataatcgaagatgaagtagagttcaaccttgagcatgctgttgtcagcacgtctgaattacgactaaaagatcttcttggtcgattgtttttcggttcaattcggttacctgagcggaatcttcaacacaatatcatccttggtgagcttctctgctatttagaaaatcgtttatggcaagacaagggattaatcgccaacctcaaaatgaacgcgttagaggcgactgtaatgttaaattgtagcctcgatcagattgcatcaatggttgaacaacgcatcttgaagccaaatcgaaaaagcaagcccaacagccctcttgatgttaccgattatctatttcatttcggcgatattttctgtctttggttagctgagttccaaagcgatgagtttaaccgttcgttttatgtgtcgaggtggtaaatgcaaactctgaaagaactaatcgcatccaatcctgacgacttaacaactgaacttaagagagcatttcgtccactcacaccgcatattgcaattgatggtaatgaacttgacgcactgacgatattagtcaatttaaccgataagactgatgatcagaaagacctgctcgatcgagccaaatgcaagcaaaaacttcgagatgaaaaatggtgggctagctgcataaattgcgttaattacagacaaagccataacccaaaattcccggatatacgttctgaaggcgtgattcgaacccaagccctgggtgaattaccgagtttcctactctcgtcctcaaaaatcccaccataccattggtcatatagccatgattcaaaatacgtcaacaaaagcgcattcctcaccaatgagttttgttgggatggtgagatctcatgtttgggtgagcttcttaaagatgcagatcacccactttggaatactttgaaaaagttaggttgttctcaaaaaacttgcaaagcaatggcaaaacaactagctgatattactctcacgactatcaatgtcacactcgcaccaaattacctgactcaaatatctctccccgatagtgatacatcctacatttcactctctcctgttgcatcgctatcgatgcaaagccactttcatcagaggctccaagatgaaaatcggcatagcgcgataacgcggtttagccgaactaccaacatgggggtcactgcgatgacatgtggcggcgcatttagaatgttaaagtctggcgctaagttttccagcccccctcatcaccgattaaacagtaaacgaagttggttgacgtcagagcatgttcagtcattaaaacagtaccagcgcctcaacaaaagcctcatacctgaaaactctcggattgcactccgtagaaaatacaaaatcgagcttcaaaatatggtcagatcttggtttgcaatgcaagaccatacccttgattcgaacatacttatccaacatttgaatcatgacctatcttacttaggagccacaaaacgttttgcatacgatccagcgatgaccaagctctttactgagcttttgaaacgagagttatcaaattcaatcaataatggtgagcaacacactaatggatcgtttttagtcctaccgaatatcagggtttgtggcgcaacagctttaagctccccggtaacggtggggattccatcacttacagctttctttggcttcgttcacgcatttgaacggaatataaatcgcaccacctcatcgtttcgtgttgaatcctttgcgatatgcgtccatcaactacatgtcgagaagcgaggtttgacagcagagtttgtggaaaaaggcgacgggactatatccgctcccgcgacccgggatgactggcagtgtgatgtcgtatttagccttattttgaacaccaactttgctcaacatattgaccaagatacgttagttacatcactaccaaagcgattggctcggggttcagcaaaaattgcgattgatgactttaaacatatcaactcattctcgacattagaaacagcgatcgaatctctgccaatagaagctggtaggtggttatcactttacgcacagtcaaacaataatctaagtgatctattagcagccatgacagaggaccatcagctcatggcaagctgcgtcggttaccacttgttagaagagcccaaagataaaccaaactccctcagaggttacaaacacgctatcgccgagtgcatcattggactcattaactcaatcacctttagctcagagactgatcccaacacaatcttttggtcgctaaagaactatcaaaactacctagtggtacagccaaggagtatcaacgatgaaactaccgacaaatctagcctatgagcgctctatcgacccatcagatgtctgtttttttgtcgtctggcccgatgatagaaaaacacctttaacctacaattctcgtactctgctcgggcaaatggaagcggcatcattagcctatgatgtctcaggtcaaccaataaaaagtgccaccgctgaggcgttagctcaagggaaccctcatcaagttgatttctgccacgttccatacggtgcgagtcatattgaatgcagtttctccgtctcgttttcttctgaactacgtcaaccatataagtgtaactcaagcaaagttaaacaaacgctagtgcaattagtcgagctctacgaaacgaaaatcggctggactgagctagcaacccgatatttgatgaacatttgcaacggtaaatggctgtggaaaaatacccgtaaagcctattgctggaacattgtacttacaccttggccttggaacggggaaaaggttggatttgaagatattcgtactaactacacctcacggcaagactttaaaaataataaaaattggtctgctatagttgaaatgatcaaaaccgcattttctagtactgatgggctggcgatatttgaagtcagggccaccttgcacttgccaacgaatgctatggtgcggccaagccaagttttcacagaaaaagaaagtggcagtaaaagtaaatctaaaactcaaaacagtcgagtttttcagagtacaactattgatggtgaacgatcgccaatactaggggcctttaaaacgggagcagctattgcaaccattgacgactggtatcctgaagccactgagccactaagggtcggacggtttggggttcatcgcgaagatgtcacttgctaccgtcatccgtctaccggaaaagattttttctcgatattacaacaagcagagcactatattgaagtgttgagcgccaacaaaactcccgctcaagaaactatcaacgacatgcactttttaatggctaacctgattaagggtgggatgttccagcataaaggagactgactgtgaaatggtattataagacaatcacctttctgccagagttgtgcaacaacgagtcactggctgcaaagtgtctccgcgttctgcatggatttaactatcagtatgagacacgaaatatcggcgtttcatttccgctttggtgtgatgcaacggttggaaaaaagatttcatttgtcagcaagaacaagatagaactcgacttactacttaaacaacactatttcgtccaaatggaacaacttcaatactttcatatatccaacactgttctcgtcccagaagattgtacatacgtttcctttagacgctgtcaatctatagataagctcacagcagcagggctggcaaggaaaatcagacgcctggagaaacgtgctctatctagaggcgagcaatttgacccatcatcttttgctcaaaaagagcatactgcaatagcgcactaccactcacttggggagtccagcaaacagacgaaccgcaactttcgactcaatatcaggatgctctcggagcaaccccgtgaggggaactcgatttttagtagctatggcttatcaaattcagaaaactcgtttcagcctgtacccttaatctgacctttaataaggagatataccatggcgacaagtttacctacgccctcagcaattacgacttcggcgttagagtatgcattccatactcccgctcgcaatctaacgaaatctcgcggaaaaaacattcatcgttatgtcagtgtaaagatgagtaagaggattacggtagaatctactctagagtgtgatgcctgctatcactttgattttgagccaagtattgttcgcttttgcgctcaaccgattcgatttttatattatctcaatggtcagtctcactcctatgttcctgactttctagttcaatttgataccaacgagtttgttctatatgaagtaaagtcagcttatgctaagaacaaacctgattttgatgttgaatgggaggcgaaagtaaaagcagcaactgaactagggctagaattggagcttgttgaagagagtgatattagggatacggttgtattaaataatcttaagcgcatgcatcgttatgcttcgaaagatgagctgaataacgtacataactctctcttaaaaataataaagtacaatggcgcccaatctgcaagatgcttgggagaacagttgggtttaaaaggccgaactgttttaccaattttgtgcgatttgctgtcaaggtgtttactcgatacacgtttggataagcctctatctcttgaatctcgatttgagttggccagttatggctaagaaagggttctcaagtttccatagaaaagcagtctcttcccaagatacgcttgaatcgatagagcttgtctctagcgctaattgtctagaaagtgttacgtatcaagatatatcagcatttcccgaaacaattgcggtagagattaatttccgattaagcattcttcgctttttagcgcgaaagtgcgaaaccattgtggccaaatcaattgaaccacatcgtgtagagctacagcaaaactatagtagaaaaatacccagtgcaataacgatatatcgatggtggcttgcttttcgaaaatcagactacaaccccattagcttagcacctaatatcaaggatagaggtaatagagagacaaaagtgtcaacagttgttgattctattatggaacaggcagttgaaagagttatatctggacgaaaagtcaatgttagctctgcatataaacgtgttcgacgaaaagttcgtcaatacaatctaactcatggaacgaaatacacgtatcctaagtacgaatctgtaagaaagcgagtaaaaaagaaaaccccatttgagttattagccgcagggaaaggggagagagtagctaagagagagtttcgccgaatgggaaaaaagatcctcacgtctagcgtgctagagagggttgaaatagatcacactgtcgttgacctttttgcagtacacgaagagtatcgaatcccattgggccgaccttggcttactcaattggttgattgttacagtaaagctgtaatcggtttttatttaggtttcgagcctcctagctatgtgtcggtttcccttgcacttaagaatgcaatacaacgcaaagatgacttaatctcctcgtatgaatcgatcgagaatgaatggctatgttatggcatcccagacctactcgtaactgataatggtaaagagtttttgtcgaaagcatttgatcaagcatgtgaatcactattgatcaatgtgcatcaaaataaagttgagacgcccgacaacaaacctcatgttgaacgtaactacgggactattaatacttctctgttagacgatttacctgggaaatccttcagccagtaccttcaaagagaagggtacgactctgtgggagaagctacccttacactcaatgagattagagaaatttacttaatttggttggtggatatttatcataaaaaacccaatcagagaggcactaattgtcctaatgttgcgtggaaaaagggttgtcaagaatgggaaccagaggagttctctggttctaaagacgaattagactttaaatttgctattgttgattacaaacaacttactaaagtagggataactgtctacaaagaactgagttatagcaatgaccgtttagctgaatatagagggaagaaaggaaaccataaagttcagttcaagtataaccctgagtgtatggcagttatttgggtgttggatgaggatatgaatgagtactttacagttaatgcgattgactacgaatatgcaagtagagtatcactttggcaacataaatataacatgaaatatcaagcagaactaaattcagcagaatatgatgaggacaaggaaattgatgcagaaataaaaattgaagaaatcgcagatcgttcaattgttaagactaacaaaatcagagctcggaggcgtggcgctaggcatcaagagaatagcgcaagggctaagtcaatcagtaatgcgaacccggcctcgatacaaaaacatgaagatgaaatcgttagtgcagataatgacgattgggatattgattatgtctgagaaatcgtcaaatgagtgaaacgcgtgaggctcgtatatcaagagctaaaagggcatttgtatccacaccgagcgttaggaaaatcttgagttacatggatagatgtagagatctatcagacctagagtctgagcctacatgcatgatggtctatggtgcttcgggtgtaggtaaaacgaccgtcatcaagaaatacttaaatcaaaacagaagagagtccgaagccgggggcgatataataccggttttgcatattgagttgccagacaatgcgaagccagtagatgcagcaagggaattgctggttgaaatgggtgacccgctagcactttatgaaactgacttagctagattgacgaaaagactgactgaattaatccctgcggtcggcgtgaagctgattattatcgatgagttccaacatttggtggaagaaaggtcaaatcgggttcttacccaagtaggtaattggctaaaaatgatacttaacaaaacgaaatgtccaattgttatatttggtatgccatactcaaaagttgtactgcaagcaaactcgcaacttcacgggcgattttccattcaggttgaactgcgcccctttagctaccagggaggtagaggtgtatttaaaacttttttggaataccttgataaagccctaccttttgaaaaacaggctggcttagccaacgaaagtttgcagaaaaaattgtatgcattctctcagggaaacatgcgttcgttgagaaaccttatttatcaagcatctatcgaagcaattgataatcagcatgagacgataaccgaagaagatttcgtttttgcatcgaagttgacatcgggcgataaacccaactcatggaaaaatccttttgaggagggtgttgaggtaacagaagatatgttacgaccgccaccaaaagatattggttgggaggactatttgagacattcaaccccgagagtgagtaaaccaggtagaaataaaaactttttcgaataacctaggctgctgcgctgctgccaccgctgagcaataactagcataaccccttggggcctctaaacgggtcttgaggggttttttgctgaaacctcaggcatgttggaacaaccataaaatgataattacacccataaattgataattatcacacccataaattgatattgcctcttcatggtctaaacttcagtaagtttacgacattttcatgaagaggtcatttccggggatccatggagaaaaaaatcactggatataccaccgttgatatatcccaatggcatcgtaaagaacattttgaggcatttcagtcagttgctcaatgtacctataaccagaccgttcagctggatattacggcctttttaaagaccgtaaagaaaaataagcacaagttttatccggcctttattcacattcttgcccgcctgatgaatgctcatccggagttccgtatggcaatgaaagacggtgagctggtgatatgggatagtgttcacccttgttacaccgttttccatgagcaaactgaaacgttttcatcgctctggagtgaataccacgacgatttccggcagtttctacacatatattcgcaagatgtggcgtgttacggtgaaaacctggcctatttccctaaagggtttattgagaatatgtttttcgtctcagccaatccctgggtgagtttcaccagttttgatttaaacgtggccaatatggacaacttcttcgcccccgttttcactatgggcaaatattatacgcaaggcgacaaggtgctgatgccgctggcgattcaggttcatcatgccgtttgtgatggcttccatgtcggcagaatgcttaatgaattacaacagtactgcgatgagtggcagggcggggcgtaatttttttaaggcagttattggtgcccttctagagtccttactgcagtagttttgctgaaatactcgattcacaaaaatatcaacttatggttgttttgtgagatatcaatatatggttgttttgtggttaagttgctgattataaataattattaaatatcactttatggttgcatcaacaggtaccgagctcgaattcactggccgtcgttttacaacgtcgtgactgggaaaaccctggcgttacccaacttaatcgccttgcggccagtttgctcaggctctccccgtggaggtaataattgacgatatgatcatttattctgcctcccagagcctgataaaaacggtgaatccgttagcgaggtgccgccggcttccattcaggtcgaggtggcccggctccatgcaccgcgacgcaacgcggggaggcagacaaggtatagggcggcgaggcggctacagccgatagtctggaacagcgcacttacgggttgctgcgcaacccaagtgctaccggcgcggcagcgtgacccgtgtcggcggctccaacggctcgccatcgtccagaaaacacggctcatcgggcatcggcaggcgctgctgcccgcgccgttcccattcctccgtttcggtcaaggctggcaggtctggttccatgcccggaatgccgggctggctgggcggctcctcgccggggccggtcggtagttgctgctcgcccggatacagggtcgggatgcggcgcaggtcgccatgccccaacagcgattcgtcctggtcgtcgtgatcaaccaccacggcggcactgaacaccgacaggcgcaactggtcgcggggctggccccacgccacgcggtcattgaccacgtaggccgacacggtgccggggccgttgagcttcacgacggagatccagcgctcggccaccaagtccttgactgcgtattggaccgtccgcaaagaacgtccgatgagcttggaaagtgtcttctggctgaccaccacggcgttctggtggcccatctgcgccacgaggtgatgcagcagcattg

SEQ ID NO: 105 - DNA, 14028 bp, artificial sequence
  Synthetic
ccgccgtgggtttcctcgcaataagcccggcccacgcctcatgcgctttgcgttccgtttgcacccagtgaccgggcttgttcttggcttgaatgccgatttctctggactgcgtggccatgcttatctccatgcggtaggggtgccgcacggttgcggcaccatgcgcaatcagctgcaacttttcggcagcgcgacaacaattatgcgttgcgtaaaagtggcagtcaattacagattttctttaacctacgcaatgagctattgcggggggtgccgcaatgagctgttgcgtaccccccttttttaagttgttgatttttaagtctttcgcatttcgccctatatctagttctttggtgcccaaagaagggcacccctgcggggttcccccacgccttcggcgcggctccccctccggcaaaaagtggcccctccggggcttgttgatcgactgcgcggccttcggccttgcccaaggtggcgctgcccccttggaacccccgcactcgccgccgtgaggctcggggggcaggcgggcgggcttcgcccttcgactgcccccactcgcataggcttgggtcgttccaggcgcgtcaaggccaagccgctgcgcggtcgctgcgcgagccttgacccgccttccacttggtgtccaaccggcaagcgaagcgcgcaggccgcaggccggaggcttttccccagagaaaattaaaaaaattgatggggcaaggccgcaggccgcgcagttggagccggtgggtatgtggtcgaaggctgggtagccggtgggcaatccctgtggtcaagctcgtgggcaggcgcagcctgtccatcagcttgtccagcagggttgtccacgggccgagcgaagcgagccagccggtggccgctcgcggccatcgtccacatatccacgggctggcaagggagcgcagcgaccgcgcagggcgaagcccggagagcaagcccgtagggcgccgcagccgccgtaggcggtcacgactttgcgaagcaaagtctagtgagtatactcaagcattgagtggcccgccggaggcaccgccttgcgctgcccccgtcgagccggttggacaccaaaagggaggggcaggcatggcggcatacgcgatcatgcgatgcaagaagctggcgaaaatgggcaacgtggcggccagtctcaagcacgcctaccgcgagcgcgagacgcccaacgctgacgccagcaggacgccagagaacgagcactgggcggccagcagcaccgatgaagcgatgggccgactgcgcgagttgctgccagagaagcggcgcaaggacgctgtgttggcggtcgagtacgtcatgacggccagcccggaatggtggaagtcggccagccaagaacagcaggcggcgttcttcgagaaggcgcacaagtggctggcggacaagtacggggcggatcgcatcgtgacggccagcatccaccgtgacgaaaccagcccgcacatgaccgcgttcgtggtgccgctgacgcaggacggcaggctgtcggccaaggagttcatcggcaacaaagcgcagatgacccgcgaccagaccacgtttgcggccgctgtggccgatctagggctgcaacggggcatcgagggcagcaaggcacgtcacacgcgcattcaggcgttctacgaggccctggagcggccaccagtgggccacgtcaccatcagcccgcaagcggtcgagccacgcgcctatgcaccgcagggattggccgaaaagctgggaatctcaaagcgcgttgagacgccggaagccgtggccgaccggctgacaaaagcggttcggcaggggtatgagcctgccctacaggccgccgcaggagcgcgtgagatgcgcaagaaggccgatcaagcccaagagacggcccgtgaccttcgggagcgcctgaagcccgttctggacgccctggggccgttgaatcgggatatgcaggccaaggccgccgcgatcatcaaggccgtgggcgaaaagctgctgacggaacagcgggaagtccagcgccagaaacaggcccagcgccagcaggaacgcgggcgcgcacatttccccgaaaagtgccacctgggatgaatgtcagctactgggctatctggacaagggaaaacgcaagcgcaaagagaaagcaggtagcttgcagtgggcttacatggcgatagctagactgggcggttttatggacagcaagcgaaccggaattgccagctggggcgccctctggtaaggttgggaagccctgcaaagtaaactggatggctttcttgccgccaaggatctgatggcgcaggggatcaagatctgatcaagagacaggatgaggatcgtttcgcatgattgaacaagatggattgcacgcaggttctccggccgcttgggtggagaggctattcggctatgactgggcacaacagacaatcggctgctctgatgccgccgtgttccggctgtcagcgcaggggcgcccggttctttttgtcaagaccgacctgtccggtgccctgaatgaactgcaagacgaggcagcgcggctatcgtggctggccacgacgggcgttccttgcgcagctgtgctcgacgttgtcactgaagcgggaagggactggctgctattgggcgaagtgccggggcaggatctcctgtcatctcaccttgctcctgccgagaaagtatccatcatggctgatgcaatgcggcggctgcatacgcttgatccggctacctgcccattcgaccaccaagcgaaacatcgcatcgagcgagcacgtactcggatggaagccggtcttgtcgatcaggatgatctggacgaagagcatcaggggctcgcgccagccgaactgttcgccaggctcaaggcgcgcatgcccgacggcgaggatctcgtcgtgacccatggcgatgcctgcttgccgaatatcatggtggaaaatggccgcttttctggattcatcgactgtggccggctgggtgtggcggaccgctatcaggacatagcgttggctacccgtgatattgctgaagagcttggcggcgaatgggctgaccgcttcctcgtgctttacggtatcgccgctcccgattcgcagcgcatcgccttctatcgccttcttgacgagttcttctgagcgggactctggggttcgaaatgaccgaccaagcgacgcccaacctgccatcacgagatttcgattccaccgccgccttctatgaaaggttgggcttcggaatcgttttccgggacgccggctggatgatcctccagcgcggggatctcatgctggagttcttcgcccacccccatgggcaaatattatacgcaaggcgacaaggtgctgatgccgctggcgattcaggttcatcatgccgtttgtgatggcttccatgtcggcagaatgcttaatgaattacaacagtttttatgcatgcgcccaatacgcaaaccgcctctccccgcgcgttggccgattcattaatgcagctggcacgacaggtttcccgactggtggataaccgtattaccgcctttgagtgagctgataccgctcgccgcagccgaacgaccgagcgcagcgagtcagtgagcgaggacacaagctttgacagctagctcagtcctaggtataatactagcgtcgacgtggagatataccatgggtgaactgccgagtaggtagctgataacgggtaccgtgggccagcatcatcagggccagcgtgaactgccgagtaggtagctgataacggatccgaattcgagcgaaggagatatacatatgtttttgcaaagacctaaaccttacagcgatgaaagtttagaaagtttctttatccgagtggctaacaaaaatggctacggtgatgtccatcgcttcctagaagccactaaacgattccttcaagacattgaccataatggctatcaaacctttccgactgatataactcggataaacccatactcagctaaaaacagttccagcgcacgaactgcgtcattcctgaaacttgcacaattgacatttaatgaaccgccagagctacttgggttggcaattaacagaacaaacatgaaatactcgccgtcaactagcgcggttgttagaggtgcagaagtctttcctcgcagtttactacggacgcactccatcccctgctgtcctttgtgtctgcgagaaaatggctacgcctcctacctttggcactttcaggggtacgaatactgccacagccataacgtacctttaattaccacttgtagctgtggtaaggagtttgactaccgagtatctgggttaaagggcatttgctgcaaatgcaaggagcctatcaccttaaccagcagggagaacggtcatgaggcagcgtgtactgtttcaaactggcttgctggccatgaatctaaacctctgccaaatcttcctaaaagctaccgatggggtttagttcattggtggatgggtattaaagatagcgagttcgatcacttttcgttcgttcaatttttctcaaactggccaaggtcattccactcgataatcgaagatgaagtagagttcaaccttgagcatgctgttgtcagcacgtctgaattacgactaaaagatcttcttggtcgattgtttttcggttcaattcggttacctgagcggaatcttcaacacaatatcatccttggtgagcttctctgctatttagaaaatcgtttatggcaagacaagggattaatcgccaacctcaaaatgaacgcgttagaggcgactgtaatgttaaattgtagcctcgatcagattgcatcaatggttgaacaacgcatcttgaagccaaatcgaaaaagcaagcccaacagccctcttgatgttaccgattatctatttcatttcggcgatattttctgtctttggttagctgagttccaaagcgatgagtttaaccgttcgttttatgtgtcgaggtggtaaatgcaaactctgaaagaactaatcgcatccaatcctgacgacttaacaactgaacttaagagagcatttcgtccactcacaccgcatattgcaattgatggtaatgaacttgacgcactgacgatattagtcaatttaaccgataagactgatgatcagaaagacctgctcgatcgagccaaatgcaagcaaaaacttcgagatgaaaaatggtgggctagctgcataaattgcgttaattacagacaaagccataacccaaaattcccggatatacgttctgaaggcgtgattcgaacccaagccctgggtgaattaccgagtttcctactctcgtcctcaaaaatcccaccataccattggtcatatagccatgattcaaaatacgtcaacaaaagcgcattcctcaccaatgagttttgttgggatggtgagatctcatgtttgggtgagcttcttaaagatgcagatcacccactttggaatactttgaaaaagttaggttgttctcaaaaaacttgcaaagcaatggcaaaacaactagctgatattactctcacgactatcaatgtcacactcgcaccaaattacctgactcaaatatctctccccgatagtgatacatcctacatttcactctctcctgttgcatcgctatcgatgcaaagccactttcatcagaggctccaagatgaaaatcggcatagcgcgataacgcggtttagccgaactaccaacatgggggtcactgcgatgacatgtggcggcgcatttagaatgttaaagtctggcgctaagttttccagcccccctcatcaccgattaaacagtaaacgaagttggttgacgtcagagcatgttcagtcattaaaacagtaccagcgcctcaacaaaagcctcatacctgaaaactctcggattgcactccgtagaaaatacaaaatcgagcttcaaaatatggtcagatcttggtttgcaatgcaagaccatacccttgattcgaacatacttatccaacatttgaatcatgacctatcttacttaggagccacaaaacgttttgcatacgatccagcgatgaccaagctctttactgagcttttgaaacgagagttatcaaattcaatcaataatggtgagcaacacactaatggatcgtttttagtcctaccgaatatcagggtttgtggcgcaacagctttaagctccccggtaacggtggggattccatcacttacagctttctttggcttcgttcacgcatttgaacggaatataaatcgcaccacctcatcgtttcgtgttgaatcctttgcgatatgcgtccatcaactacatgtcgagaagcgaggtttgacagcagagtttgtggaaaaaggcgacgggactatatccgctcccgcgacccgggatgactggcagtgtgatgtcgtatttagccttattttgaacaccaactttgctcaacatattgaccaagatacgttagttacatcactaccaaagcgattggctcggggttcagcaaaaattgcgattgatgactttaaacatatcaactcattctcgacattagaaacagcgatcgaatctctgccaatagaagctggtaggtggttatcactttacgcacagtcaaacaataatctaagtgatctattagcagccatgacagaggaccatcagctcatggcaagctgcgtcggttaccacttgttagaagagcccaaagataaaccaaactccctcagaggttacaaacacgctatcgccgagtgcatcattggactcattaactcaatcacctttagctcagagactgatcccaacacaatcttttggtcgctaaagaactatcaaaactacctagtggtacagccaaggagtatcaacgatgaaactaccgacaaatctagcctatgagcgctctatcgacccatcagatgtctgtttttttgtcgtctggcccgatgatagaaaaacacctttaacctacaattctcgtactctgctcgggcaaatggaagcggcatcattagcctatgatgtctcaggtcaaccaataaaaagtgccaccgctgaggcgttagctcaagggaaccctcatcaagttgatttctgccacgttccatacggtgcgagtcatattgaatgcagtttctccgtctcgttttcttctgaactacgtcaaccatataagtgtaactcaagcaaagttaaacaaacgctagtgcaattagtcgagctctacgaaacgaaaatcggctggactgagctagcaacccgatatttgatgaacatttgcaacggtaaatggctgtggaaaaatacccgtaaagcctattgctggaacattgtacttacaccttggccttggaacggggaaaaggttggatttgaagatattcgtactaactacacctcacggcaagactttaaaaataataaaaattggtctgctatagttgaaatgatcaaaaccgcattttctagtactgatgggctggcgatatttgaagtcagggccaccttgcacttgccaacgaatgctatggtgcggccaagccaagttttcacagaaaaagaaagtggcagtaaaagtaaatctaaaactcaaaacagtcgagtttttcagagtacaactattgatggtgaacgatcgccaatactaggggcctttaaaacgggagcagctattgcaaccattgacgactggtatcctgaagccactgagccactaagggtcggacggtttggggttcatcgcgaagatgtcacttgctaccgtcatccgtctaccggaaaagattttttctcgatattacaacaagcagagcactatattgaagtgttgagcgccaacaaaactcccgctcaagaaactatcaacgacatgcactttttaatggctaacctgattaagggtgggatgttccagcataaaggagactgactgtgaaatggtattataagacaatcacctttctgccagagttgtgcaacaacgagtcactggctgcaaagtgtctccgcgttctgcatggatttaactatcagtatgagacacgaaatatcggcgtttcatttccgctttggtgtgatgcaacggttggaaaaaagatttcatttgtcagcaagaacaagatagaactcgacttactacttaaacaacactatttcgtccaaatggaacaacttcaatactttcatatatccaacactgttctcgtcccagaagattgtacatacgtttcctttagacgctgtcaatctatagataagctcacagcagcagggctggcaaggaaaatcagacgcctggagaaacgtgctctatctagaggcgagcaatttgacccatcatcttttgctcaaaaagagcatactgcaatagcgcactaccactcacttggggagtccagcaaacagacgaaccgcaactttcgactcaatatcaggatgctctcggagcaaccccgtgaggggaactcgatttttagtagctatggcttatcaaattcagaaaactcgtttcagcctgtacccttaatctgacctttaataaggagatataccatggcgacaagtttacctacgccctcagcaattacgacttcggcgttagagtatgcattccatactcccgctcgcaatctaacgaaatctcgcggaaaaaacattcatcgttatgtcagtgtaaagatgagtaagaggattacggtagaatctactctagagtgtgatgcctgctatcactttgattttgagccaagtattgttcgcttttgcgctcaaccgattcgatttttatattatctcaatggtcagtctcactcctatgttcctgactttctagttcaatttgataccaacgagtttgttctatatgaagtaaagtcagcttatgctaagaacaaacctgattttgatgttgaatgggaggcgaaagtaaaagcagcaactgaactagggctagaattggagcttgttgaagagagtgatattagggatacggttgtattaaataatcttaagcgcatgcatcgttatgcttcgaaagatgagctgaataacgtacataactctctcttaaaaataataaagtacaatggcgcccaatctgcaagatgcttgggagaacagttgggtttaaaaggccgaactgttttaccaattttgtgcgatttgctgtcaaggtgtttactcgatacacgtttggataagcctctatctcttgaatctcgatttgagttggccagttatggctaagaaagggttctcaagtttccatagaaaagcagtctcttcccaagatacgcttgaatcgatagagcttgtctctagcgctaattgtctagaaagtgttacgtatcaagatatatcagcatttcccgaaacaattgcggtagagattaatttccgattaagcattcttcgctttttagcgcgaaagtgcgaaaccattgtggccaaatcaattgaaccacatcgtgtagagctacagcaaaactatagtagaaaaatacccagtgcaataacgatatatcgatggtggcttgcttttcgaaaatcagactacaaccccattagcttagcacctaatatcaaggatagaggtaatagagagacaaaagtgtcaacagttgttgattctattatggaacaggcagttgaaagagttatatctggacgaaaagtcaatgttagctctgcatataaacgtgttcgacgaaaagttcgtcaatacaatctaactcatggaacgaaatacacgtatcctaagtacgaatctgtaagaaagcgagtaaaaaagaaaaccccatttgagttattagccgcagggaaaggggagagagtagctaagagagagtttcgccgaatgggaaaaaagatcctcacgtctagcgtgctagagagggttgaaatagatcacactgtcgttgacctttttgcagtacacgaagagtatcgaatcccattgggccgaccttggcttactcaattggttgattgttacagtaaagctgtaatcggtttttatttaggtttcgagcctcctagctatgtgtcggtttcccttgcacttaagaatgcaatacaacgcaaagatgacttaatctcctcgtatgaatcgatcgagaatgaatggctatgttatggcatcccagacctactcgtaactgataatggtaaagagtttttgtcgaaagcatttgatcaagcatgtgaatcactattgatcaatgtgcatcaaaataaagttgagacgcccgacaacaaacctcatgttgaacgtaactacgggactattaatacttctctgttagacgatttacctgggaaatccttcagccagtaccttcaaagagaagggtacgactctgtgggagaagctacccttacactcaatgagattagagaaatttacttaatttggttggtggatatttatcataaaaaacccaatcagagaggcactaattgtcctaatgttgcgtggaaaaagggttgtcaagaatgggaaccagaggagttctctggttctaaagacgaattagactttaaatttgctattgttgattacaaacaacttactaaagtagggataactgtctacaaagaactgagttatagcaatgaccgtttagctgaatatagagggaagaaaggaaaccataaagttcagttcaagtataaccctgagtgtatggcagttatttgggtgttggatgaggatatgaatgagtactttacagttaatgcgattgactacgaatatgcaagtagagtatcactttggcaacataaatataacatgaaatatcaagcagaactaaattcagcagaatatgatgaggacaaggaaattgatgcagaaataaaaattgaagaaatcgcagatcgttcaattgttaagactaacaaaatcagagctcggaggcgtggcgctaggcatcaagagaatagcgcaagggctaagtcaatcagtaatgcgaacccggcctcgatacaaaaacatgaagatgaaatcgttagtgcagataatgacgattgggatattgattatgtctgagaaatcgtcaaatgagtgaaacgcgtgaggctcgtatatcaagagctaaaagggcatttgtatccacaccgagcgttaggaaaatcttgagttacatggatagatgtagagatctatcagacctagagtctgagcctacatgcatgatggtctatggtgcttcgggtgtaggtaaaacgaccgtcatcaagaaatacttaaatcaaaacagaagagagtccgaagccgggggcgatataataccggttttgcatattgagttgccagacaatgcgaagccagtagatgcagcaagggaattgctggttgaaatgggtgacccgctagcactttatgaaactgacttagctagattgacgaaaagactgactgaattaatccctgcggtcggcgtgaagctgattattatcgatgagttccaacatttggtggaagaaaggtcaaatcgggttcttacccaagtaggtaattggctaaaaatgatacttaacaaaacgaaatgtccaattgttatatttggtatgccatactcaaaagttgtactgcaagcaaactcgcaacttcacgggcgattttccattcaggttgaactgcgcccctttagctaccagggaggtagaggtgtatttaaaacttttttggaataccttgataaagccctaccttttgaaaaacaggctggcttagccaacgaaagtttgcagaaaaaattgtatgcattctctcagggaaacatgcgttcgttgagaaaccttatttatcaagcatctatcgaagcaattgataatcagcatgagacgataaccgaagaagatttcgtttttgcatcgaagttgacatcgggcgataaacccaactcatggaaaaatccttttgaggagggtgttgaggtaacagaagatatgttacgaccgccaccaaaagatattggttgggaggactatttgagacattcaaccccgagagtgagtaaaccaggtagaaataaaaactttttcgaataacctaggctgctgcgctgctgccaccgctgagcaataactagcataaccccttggggcctctaaacgggtcttgaggggttttttgctgaaacctcaggcatgttggaacaaccataaaatgataattacacccataaattgataattatcacacccataaattgatattgcctcttcatggtctaaacttcagtaagtttacgacattttcatgaagaggtcatttccggggatccatggagaaaaaaatcactggatataccaccgttgatatatcccaatggcatcgtaaagaacattttgaggcatttcagtcagttgctcaatgtacctataaccagaccgttcagctggatattacggcctttttaaagaccgtaaagaaaaataagcacaagttttatccggcctttattcacattcttgcccgcctgatgaatgctcatccggagttccgtatggcaatgaaagacggtgagctggtgatatgggatagtgttcacccttgttacaccgttttccatgagcaaactgaaacgttttcatcgctctggagtgaataccacgacgatttccggcagtttctacacatatattcgcaagatgtggcgtgttacggtgaaaacctggcctatttccctaaagggtttattgagaatatgtttttcgtctcagccaatccctgggtgagtttcaccagttttgatttaaacgtggccaatatggacaacttcttcgcccccgttttcactatgggcaaatattatacgcaaggcgacaaggtgctgatgccgctggcgattcaggttcatcatgccgtttgtgatggcttccatgtcggcagaatgcttaatgaattacaacagtactgcgatgagtggcagggcggggcgtaatttttttaaggcagttattggtgcccttctagagtccttactgcagtagttttgctgaaatactcgattcacaaaaatatcaacttatggttgttttgtgagatatcaatatatggttgttttgtggttaagttgctgattataaataattattaaatatcactttatggttgcatcaacaggtaccgagctcgaattcactggccgtcgttttacaacgtcgtgactgggaaaaccctggcgttacccaacttaatcgccttgcggccagtttgctcaggctctccccgtggaggtaataattgacgatatgatcatttattctgcctcccagagcctgataaaaacggtgaatccgttagcgaggtgccgccggcttccattcaggtcgaggtggcccggctccatgcaccgcgacgcaacgcggggaggcagacaaggtatagggcggcgaggcggctacagccgatagtctggaacagcgcacttacgggttgctgcgcaacccaagtgctaccggcgcggcagcgtgacccgtgtcggcggctccaacggctcgccatcgtccagaaaacacggctcatcgggcatcggcaggcgctgctgcccgcgccgttcccattcctccgtttcggtcaaggctggcaggtctggttccatgcccggaatgccgggctggctgggcggctcctcgccggggccggtcggtagttgctgctcgcccggatacagggtcgggatgcggcgcaggtcgccatgccccaacagcgattcgtcctggtcgtcgtgatcaaccaccacggcggcactgaacaccgacaggcgcaactggtcgcggggctggccccacgccacgcggtcattgaccacgtaggccgacacggtgccggggccgttgagcttcacgacggagatccagcgctcggccaccaagtccttgactgcgtattggaccgtccgcaaagaacgtccgatgagcttggaaagtgtcttctggctgaccaccacggcgttctggtggcccatctgcgccacgaggtgatgcagcagcattg

SEQ ID NO: 106 - DNA, 14028 bp, artificial sequence
  Synthetic
ccgccgtgggtttcctcgcaataagcccggcccacgcctcatgcgctttgcgttccgtttgcacccagtgaccgggcttgttcttggcttgaatgccgatttctctggactgcgtggccatgcttatctccatgcggtaggggtgccgcacggttgcggcaccatgcgcaatcagctgcaacttttcggcagcgcgacaacaattatgcgttgcgtaaaagtggcagtcaattacagattttctttaacctacgcaatgagctattgcggggggtgccgcaatgagctgttgcgtaccccccttttttaagttgttgatttttaagtctttcgcatttcgccctatatctagttctttggtgcccaaagaagggcacccctgcggggttcccccacgccttcggcgcggctccccctccggcaaaaagtggcccctccggggcttgttgatcgactgcgcggccttcggccttgcccaaggtggcgctgcccccttggaacccccgcactcgccgccgtgaggctcggggggcaggcgggcgggcttcgcccttcgactgcccccactcgcataggcttgggtcgttccaggcgcgtcaaggccaagccgctgcgcggtcgctgcgcgagccttgacccgccttccacttggtgtccaaccggcaagcgaagcgcgcaggccgcaggccggaggcttttccccagagaaaattaaaaaaattgatggggcaaggccgcaggccgcgcagttggagccggtgggtatgtggtcgaaggctgggtagccggtgggcaatccctgtggtcaagctcgtgggcaggcgcagcctgtccatcagcttgtccagcagggttgtccacgggccgagcgaagcgagccagccggtggccgctcgcggccatcgtccacatatccacgggctggcaagggagcgcagcgaccgcgcagggcgaagcccggagagcaagcccgtagggcgccgcagccgccgtaggcggtcacgactttgcgaagcaaagtctagtgagtatactcaagcattgagtggcccgccggaggcaccgccttgcgctgcccccgtcgagccggttggacaccaaaagggaggggcaggcatggcggcatacgcgatcatgcgatgcaagaagctggcgaaaatgggcaacgtggcggccagtctcaagcacgcctaccgcgagcgcgagacgcccaacgctgacgccagcaggacgccagagaacgagcactgggcggccagcagcaccgatgaagcgatgggccgactgcgcgagttgctgccagagaagcggcgcaaggacgctgtgttggcggtcgagtacgtcatgacggccagcccggaatggtggaagtcggccagccaagaacagcaggcggcgttcttcgagaaggcgcacaagtggctggcggacaagtacggggcggatcgcatcgtgacggccagcatccaccgtgacgaaaccagcccgcacatgaccgcgttcgtggtgccgctgacgcaggacggcaggctgtcggccaaggagttcatcggcaacaaagcgcagatgacccgcgaccagaccacgtttgcggccgctgtggccgatctagggctgcaacggggcatcgagggcagcaaggcacgtcacacgcgcattcaggcgttctacgaggccctggagcggccaccagtgggccacgtcaccatcagcccgcaagcggtcgagccacgcgcctatgcaccgcagggattggccgaaaagctgggaatctcaaagcgcgttgagacgccggaagccgtggccgaccggctgacaaaagcggttcggcaggggtatgagcctgccctacaggccgccgcaggagcgcgtgagatgcgcaagaaggccgatcaagcccaagagacggcccgtgaccttcgggagcgcctgaagcccgttctggacgccctggggccgttgaatcgggatatgcaggccaaggccgccgcgatcatcaaggccgtgggcgaaaagctgctgacggaacagcgggaagtccagcgccagaaacaggcccagcgccagcaggaacgcgggcgcgcacatttccccgaaaagtgccacctgggatgaatgtcagctactgggctatctggacaagggaaaacgcaagcgcaaagagaaagcaggtagcttgcagtgggcttacatggcgatagctagactgggcggttttatggacagcaagcgaaccggaattgccagctggggcgccctctggtaaggttgggaagccctgcaaagtaaactggatggctttcttgccgccaaggatctgatggcgcaggggatcaagatctgatcaagagacaggatgaggatcgtttcgcatgattgaacaagatggattgcacgcaggttctccggccgcttgggtggagaggctattcggctatgactgggcacaacagacaatcggctgctctgatgccgccgtgttccggctgtcagcgcaggggcgcccggttctttttgtcaagaccgacctgtccggtgccctgaatgaactgcaagacgaggcagcgcggctatcgtggctggccacgacgggcgttccttgcgcagctgtgctcgacgttgtcactgaagcgggaagggactggctgctattgggcgaagtgccggggcaggatctcctgtcatctcaccttgctcctgccgagaaagtatccatcatggctgatgcaatgcggcggctgcatacgcttgatccggctacctgcccattcgaccaccaagcgaaacatcgcatcgagcgagcacgtactcggatggaagccggtcttgtcgatcaggatgatctggacgaagagcatcaggggctcgcgccagccgaactgttcgccaggctcaaggcgcgcatgcccgacggcgaggatctcgtcgtgacccatggcgatgcctgcttgccgaatatcatggtggaaaatggccgcttttctggattcatcgactgtggccggctgggtgtggcggaccgctatcaggacatagcgttggctacccgtgatattgctgaagagcttggcggcgaatgggctgaccgcttcctcgtgctttacggtatcgccgctcccgattcgcagcgcatcgccttctatcgccttcttgacgagttcttctgagcgggactctggggttcgaaatgaccgaccaagcgacgcccaacctgccatcacgagatttcgattccaccgccgccttctatgaaaggttgggcttcggaatcgttttccgggacgccggctggatgatcctccagcgcggggatctcatgctggagttcttcgcccacccccatgggcaaatattatacgcaaggcgacaaggtgctgatgccgctggcgattcaggttcatcatgccgtttgtgatggcttccatgtcggcagaatgcttaatgaattacaacagtttttatgcatgcgcccaatacgcaaaccgcctctccccgcgcgttggccgattcattaatgcagctggcacgacaggtttcccgactggtggataaccgtattaccgcctttgagtgagctgataccgctcgccgcagccgaacgaccgagcgcagcgagtcagtgagcgaggacacaagctttgacagctagctcagtcctaggtataatactagcgtcgacgtggagatataccatgggtgaactgccgagtaggtagctgataaccacgaccgatgatattggcaccggagcgtggggtgaactgccgagtaggtagctgataacggatccgaattcgagcgaaggagatatacatatgtttttgcaaagacctaaaccttacagcgatgaaagtttagaaagtttctttatccgagtggctaacaaaaatggctacggtgatgtccatcgcttcctagaagccactaaacgattccttcaagacattgaccataatggctatcaaacctttccgactgatataactcggataaacccatactcagctaaaaacagttccagcgcacgaactgcgtcattcctgaaacttgcacaattgacatttaatgaaccgccagagctacttgggttggcaattaacagaacaaacatgaaatactcgccgtcaactagcgcggttgttagaggtgcagaagtctttcctcgcagtttactacggacgcactccatcccctgctgtcctttgtgtctgcgagaaaatggctacgcctcctacctttggcactttcaggggtacgaatactgccacagccataacgtacctttaattaccacttgtagctgtggtaaggagtttgactaccgagtatctgggttaaagggcatttgctgcaaatgcaaggagcctatcaccttaaccagcagggagaacggtcatgaggcagcgtgtactgtttcaaactggcttgctggccatgaatctaaacctctgccaaatcttcctaaaagctaccgatggggtttagttcattggtggatgggtattaaagatagcgagttcgatcacttttcgttcgttcaatttttctcaaactggccaaggtcattccactcgataatcgaagatgaagtagagttcaaccttgagcatgctgttgtcagcacgtctgaattacgactaaaagatcttcttggtcgattgtttttcggttcaattcggttacctgagcggaatcttcaacacaatatcatccttggtgagcttctctgctatttagaaaatcgtttatggcaagacaagggattaatcgccaacctcaaaatgaacgcgttagaggcgactgtaatgttaaattgtagcctcgatcagattgcatcaatggttgaacaacgcatcttgaagccaaatcgaaaaagcaagcccaacagccctcttgatgttaccgattatctatttcatttcggcgatattttctgtctttggttagctgagttccaaagcgatgagtttaaccgttcgttttatgtgtcgaggtggtaaatgcaaactctgaaagaactaatcgcatccaatcctgacgacttaacaactgaacttaagagagcatttcgtccactcacaccgcatattgcaattgatggtaatgaacttgacgcactgacgatattagtcaatttaaccgataagactgatgatcagaaagacctgctcgatcgagccaaatgcaagcaaaaacttcgagatgaaaaatggtgggctagctgcataaattgcgttaattacagacaaagccataacccaaaattcccggatatacgttctgaaggcgtgattcgaacccaagccctgggtgaattaccgagtttcctactctcgtcctcaaaaatcccaccataccattggtcatatagccatgattcaaaatacgtcaacaaaagcgcattcctcaccaatgagttttgttgggatggtgagatctcatgtttgggtgagcttcttaaagatgcagatcacccactttggaatactttgaaaaagttaggttgttctcaaaaaacttgcaaagcaatggcaaaacaactagctgatattactctcacgactatcaatgtcacactcgcaccaaattacctgactcaaatatctctccccgatagtgatacatcctacatttcactctctcctgttgcatcgctatcgatgcaaagccactttcatcagaggctccaagatgaaaatcggcatagcgcgataacgcggtttagccgaactaccaacatgggggtcactgcgatgacatgtggcggcgcatttagaatgttaaagtctggcgctaagttttccagcccccctcatcaccgattaaacagtaaacgaagttggttgacgtcagagcatgttcagtcattaaaacagtaccagcgcctcaacaaaagcctcatacctgaaaactctcggattgcactccgtagaaaatacaaaatcgagcttcaaaatatggtcagatcttggtttgcaatgcaagaccatacccttgattcgaacatacttatccaacatttgaatcatgacctatcttacttaggagccacaaaacgttttgcatacgatccagcgatgaccaagctctttactgagcttttgaaacgagagttatcaaattcaatcaataatggtgagcaacacactaatggatcgtttttagtcctaccgaatatcagggtttgtggcgcaacagctttaagctccccggtaacggtggggattccatcacttacagctttctttggcttcgttcacgcatttgaacggaatataaatcgcaccacctcatcgtttcgtgttgaatcctttgcgatatgcgtccatcaactacatgtcgagaagcgaggtttgacagcagagtttgtggaaaaaggcgacgggactatatccgctcccgcgacccgggatgactggcagtgtgatgtcgtatttagccttattttgaacaccaactttgctcaacatattgaccaagatacgttagttacatcactaccaaagcgattggctcggggttcagcaaaaattgcgattgatgactttaaacatatcaactcattctcgacattagaaacagcgatcgaatctctgccaatagaagctggtaggtggttatcactttacgcacagtcaaacaataatctaagtgatctattagcagccatgacagaggaccatcagctcatggcaagctgcgtcggttaccacttgttagaagagcccaaagataaaccaaactccctcagaggttacaaacacgctatcgccgagtgcatcattggactcattaactcaatcacctttagctcagagactgatcccaacacaatcttttggtcgctaaagaactatcaaaactacctagtggtacagccaaggagtatcaacgatgaaactaccgacaaatctagcctatgagcgctctatcgacccatcagatgtctgtttttttgtcgtctggcccgatgatagaaaaacacctttaacctacaattctcgtactctgctcgggcaaatggaagcggcatcattagcctatgatgtctcaggtcaaccaataaaaagtgccaccgctgaggcgttagctcaagggaaccctcatcaagttgatttctgccacgttccatacggtgcgagtcatattgaatgcagtttctccgtctcgttttcttctgaactacgtcaaccatataagtgtaactcaagcaaagttaaacaaacgctagtgcaattagtcgagctctacgaaacgaaaatcggctggactgagctagcaacccgatatttgatgaacatttgcaacggtaaatggctgtggaaaaatacccgtaaagcctattgctggaacattgtacttacaccttggccttggaacggggaaaaggttggatttgaagatattcgtactaactacacctcacggcaagactttaaaaataataaaaattggtctgctatagttgaaatgatcaaaaccgcattttctagtactgatgggctggcgatatttgaagtcagggccaccttgcacttgccaacgaatgctatggtgcggccaagccaagttttcacagaaaaagaaagtggcagtaaaagtaaatctaaaactcaaaacagtcgagtttttcagagtacaactattgatggtgaacgatcgccaatactaggggcctttaaaacgggagcagctattgcaaccattgacgactggtatcctgaagccactgagccactaagggtcggacggtttggggttcatcgcgaagatgtcacttgctaccgtcatccgtctaccggaaaagattttttctcgatattacaacaagcagagcactatattgaagtgttgagcgccaacaaaactcccgctcaagaaactatcaacgacatgcactttttaatggctaacctgattaagggtgggatgttccagcataaaggagactgactgtgaaatggtattataagacaatcacctttctgccagagttgtgcaacaacgagtcactggctgcaaagtgtctccgcgttctgcatggatttaactatcagtatgagacacgaaatatcggcgtttcatttccgctttggtgtgatgcaacggttggaaaaaagatttcatttgtcagcaagaacaagatagaactcgacttactacttaaacaacactatttcgtccaaatggaacaacttcaatactttcatatatccaacactgttctcgtcccagaagattgtacatacgtttcctttagacgctgtcaatctatagataagctcacagcagcagggctggcaaggaaaatcagacgcctggagaaacgtgctctatctagaggcgagcaatttgacccatcatcttttgctcaaaaagagcatactgcaatagcgcactaccactcacttggggagtccagcaaacagacgaaccgcaactttcgactcaatatcaggatgctctcggagcaaccccgtgaggggaactcgatttttagtagctatggcttatcaaattcagaaaactcgtttcagcctgtacccttaatctgacctttaataaggagatataccatggcgacaagtttacctacgccctcagcaattacgacttcggcgttagagtatgcattccatactcccgctcgcaatctaacgaaatctcgcggaaaaaacattcatcgttatgtcagtgtaaagatgagtaagaggattacggtagaatctactctagagtgtgatgcctgctatcactttgattttgagccaagtattgttcgcttttgcgctcaaccgattcgatttttatattatctcaatggtcagtctcactcctatgttcctgactttctagttcaatttgataccaacgagtttgttctatatgaagtaaagtcagcttatgctaagaacaaacctgattttgatgttgaatgggaggcgaaagtaaaagcagcaactgaactagggctagaattggagcttgttgaagagagtgatattagggatacggttgtattaaataatcttaagcgcatgcatcgttatgcttcgaaagatgagctgaataacgtacataactctctcttaaaaataataaagtacaatggcgcccaatctgcaagatgcttgggagaacagttgggtttaaaaggccgaactgttttaccaattttgtgcgatttgctgtcaaggtgtttactcgatacacgtttggataagcctctatctcttgaatctcgatttgagttggccagttatggctaagaaagggttctcaagtttccatagaaaagcagtctcttcccaagatacgcttgaatcgatagagcttgtctctagcgctaattgtctagaaagtgttacgtatcaagatatatcagcatttcccgaaacaattgcggtagagattaatttccgattaagcattcttcgctttttagcgcgaaagtgcgaaaccattgtggccaaatcaattgaaccacatcgtgtagagctacagcaaaactatagtagaaaaatacccagtgcaataacgatatatcgatggtggcttgcttttcgaaaatcagactacaaccccattagcttagcacctaatatcaaggatagaggtaatagagagacaaaagtgtcaacagttgttgattctattatggaacaggcagttgaaagagttatatctggacgaaaagtcaatgttagctctgcatataaacgtgttcgacgaaaagttcgtcaatacaatctaactcatggaacgaaatacacgtatcctaagtacgaatctgtaagaaagcgagtaaaaaagaaaaccccatttgagttattagccgcagggaaaggggagagagtagctaagagagagtttcgccgaatgggaaaaaagatcctcacgtctagcgtgctagagagggttgaaatagatcacactgtcgttgacctttttgcagtacacgaagagtatcgaatcccattgggccgaccttggcttactcaattggttgattgttacagtaaagctgtaatcggtttttatttaggtttcgagcctcctagctatgtgtcggtttcccttgcacttaagaatgcaatacaacgcaaagatgacttaatctcctcgtatgaatcgatcgagaatgaatggctatgttatggcatcccagacctactcgtaactgataatggtaaagagtttttgtcgaaagcatttgatcaagcatgtgaatcactattgatcaatgtgcatcaaaataaagttgagacgcccgacaacaaacctcatgttgaacgtaactacgggactattaatacttctctgttagacgatttacctgggaaatccttcagccagtaccttcaaagagaagggtacgactctgtgggagaagctacccttacactcaatgagattagagaaatttacttaatttggttggtggatatttatcataaaaaacccaatcagagaggcactaattgtcctaatgttgcgtggaaaaagggttgtcaagaatgggaaccagaggagttctctggttctaaagacgaattagactttaaatttgctattgttgattacaaacaacttactaaagtagggataactgtctacaaagaactgagttatagcaatgaccgtttagctgaatatagagggaagaaaggaaaccataaagttcagttcaagtataaccctgagtgtatggcagttatttgggtgttggatgaggatatgaatgagtactttacagttaatgcgattgactacgaatatgcaagtagagtatcactttggcaacataaatataacatgaaatatcaagcagaactaaattcagcagaatatgatgaggacaaggaaattgatgcagaaataaaaattgaagaaatcgcagatcgttcaattgttaagactaacaaaatcagagctcggaggcgtggcgctaggcatcaagagaatagcgcaagggctaagtcaatcagtaatgcgaacccggcctcgatacaaaaacatgaagatgaaatcgttagtgcagataatgacgattgggatattgattatgtctgagaaatcgtcaaatgagtgaaacgcgtgaggctcgtatatcaagagctaaaagggcatttgtatccacaccgagcgttaggaaaatcttgagttacatggatagatgtagagatctatcagacctagagtctgagcctacatgcatgatggtctatggtgcttcgggtgtaggtaaaacgaccgtcatcaagaaatacttaaatcaaaacagaagagagtccgaagccgggggcgatataataccggttttgcatattgagttgccagacaatgcgaagccagtagatgcagcaagggaattgctggttgaaatgggtgacccgctagcactttatgaaactgacttagctagattgacgaaaagactgactgaattaatccctgcggtcggcgtgaagctgattattatcgatgagttccaacatttggtggaagaaaggtcaaatcgggttcttacccaagtaggtaattggctaaaaatgatacttaacaaaacgaaatgtccaattgttatatttggtatgccatactcaaaagttgtactgcaagcaaactcgcaacttcacgggcgattttccattcaggttgaactgcgcccctttagctaccagggaggtagaggtgtatttaaaacttttttggaataccttgataaagccctaccttttgaaaaacaggctggcttagccaacgaaagtttgcagaaaaaattgtatgcattctctcagggaaacatgcgttcgttgagaaaccttatttatcaagcatctatcgaagcaattgataatcagcatgagacgataaccgaagaagatttcgtttttgcatcgaagttgacatcgggcgataaacccaactcatggaaaaatccttttgaggagggtgttgaggtaacagaagatatgttacgaccgccaccaaaagatattggttgggaggactatttgagacattcaaccccgagagtgagtaaaccaggtagaaataaaaactttttcgaataacctaggctgctgcgctgctgccaccgctgagcaataactagcataaccccttggggcctctaaacgggtcttgaggggttttttgctgaaacctcaggcatgttggaacaaccataaaatgataattacacccataaattgataattatcacacccataaattgatattgcctcttcatggtctaaacttcagtaagtttacgacattttcatgaagaggtcatttccggggatccatggagaaaaaaatcactggatataccaccgttgatatatcccaatggcatcgtaaagaacattttgaggcatttcagtcagttgctcaatgtacctataaccagaccgttcagctggatattacggcctttttaaagaccgtaaagaaaaataagcacaagttttatccggcctttattcacattcttgcccgcctgatgaatgctcatccggagttccgtatggcaatgaaagacggtgagctggtgatatgggatagtgttcacccttgttacaccgttttccatgagcaaactgaaacgttttcatcgctctggagtgaataccacgacgatttccggcagtttctacacatatattcgcaagatgtggcgtgttacggtgaaaacctggcctatttccctaaagggtttattgagaatatgtttttcgtctcagccaatccctgggtgagtttcaccagttttgatttaaacgtggccaatatggacaacttcttcgcccccgttttcactatgggcaaatattatacgcaaggcgacaaggtgctgatgccgctggcgattcaggttcatcatgccgtttgtgatggcttccatgtcggcagaatgcttaatgaattacaacagtactgcgatgagtggcagggcggggcgtaatttttttaaggcagttattggtgcccttctagagtccttactgcagtagttttgctgaaatactcgattcacaaaaatatcaacttatggttgttttgtgagatatcaatatatggttgttttgtggttaagttgctgattataaataattattaaatatcactttatggttgcatcaacaggtaccgagctcgaattcactggccgtcgttttacaacgtcgtgactgggaaaaccctggcgttacccaacttaatcgccttgcggccagtttgctcaggctctccccgtggaggtaataattgacgatatgatcatttattctgcctcccagagcctgataaaaacggtgaatccgttagcgaggtgccgccggcttccattcaggtcgaggtggcccggctccatgcaccgcgacgcaacgcggggaggcagacaaggtatagggcggcgaggcggctacagccgatagtctggaacagcgcacttacgggttgctgcgcaacccaagtgctaccggcgcggcagcgtgacccgtgtcggcggctccaacggctcgccatcgtccagaaaacacggctcatcgggcatcggcaggcgctgctgcccgcgccgttcccattcctccgtttcggtcaaggctggcaggtctggttccatgcccggaatgccgggctggctgggcggctcctcgccggggccggtcggtagttgctgctcgcccggatacagggtcgggatgcggcgcaggtcgccatgccccaacagcgattcgtcctggtcgtcgtgatcaaccaccacggcggcactgaacaccgacaggcgcaactggtcgcggggctggccccacgccacgcggtcattgaccacgtaggccgacacggtgccggggccgttgagcttcacgacggagatccagcgctcggccaccaagtccttgactgcgtattggaccgtccgcaaagaacgtccgatgagcttggaaagtgtcttctggctgaccaccacggcgttctggtggcccatctgcgccacgaggtgatgcagcagcattg

SEQ ID NO: 107 - DNA, 14028 bp, artificial sequence
  Synthetic
ccgccgtgggtttcctcgcaataagcccggcccacgcctcatgcgctttgcgttccgtttgcacccagtgaccgggcttgttcttggcttgaatgccgatttctctggactgcgtggccatgcttatctccatgcggtaggggtgccgcacggttgcggcaccatgcgcaatcagctgcaacttttcggcagcgcgacaacaattatgcgttgcgtaaaagtggcagtcaattacagattttctttaacctacgcaatgagctattgcggggggtgccgcaatgagctgttgcgtaccccccttttttaagttgttgatttttaagtctttcgcatttcgccctatatctagttctttggtgcccaaagaagggcacccctgcggggttcccccacgccttcggcgcggctccccctccggcaaaaagtggcccctccggggcttgttgatcgactgcgcggccttcggccttgcccaaggtggcgctgcccccttggaacccccgcactcgccgccgtgaggctcggggggcaggcgggcgggcttcgcccttcgactgcccccactcgcataggcttgggtcgttccaggcgcgtcaaggccaagccgctgcgcggtcgctgcgcgagccttgacccgccttccacttggtgtccaaccggcaagcgaagcgcgcaggccgcaggccggaggcttttccccagagaaaattaaaaaaattgatggggcaaggccgcaggccgcgcagttggagccggtgggtatgtggtcgaaggctgggtagccggtgggcaatccctgtggtcaagctcgtgggcaggcgcagcctgtccatcagcttgtccagcagggttgtccacgggccgagcgaagcgagccagccggtggccgctcgcggccatcgtccacatatccacgggctggcaagggagcgcagcgaccgcgcagggcgaagcccggagagcaagcccgtagggcgccgcagccgccgtaggcggtcacgactttgcgaagcaaagtctagtgagtatactcaagcattgagtggcccgccggaggcaccgccttgcgctgcccccgtcgagccggttggacaccaaaagggaggggcaggcatggcggcatacgcgatcatgcgatgcaagaagctggcgaaaatgggcaacgtggcggccagtctcaagcacgcctaccgcgagcgcgagacgcccaacgctgacgccagcaggacgccagagaacgagcactgggcggccagcagcaccgatgaagcgatgggccgactgcgcgagttgctgccagagaagcggcgcaaggacgctgtgttggcggtcgagtacgtcatgacggccagcccggaatggtggaagtcggccagccaagaacagcaggcggcgttcttcgagaaggcgcacaagtggctggcggacaagtacggggcggatcgcatcgtgacggccagcatccaccgtgacgaaaccagcccgcacatgaccgcgttcgtggtgccgctgacgcaggacggcaggctgtcggccaaggagttcatcggcaacaaagcgcagatgacccgcgaccagaccacgtttgcggccgctgtggccgatctagggctgcaacggggcatcgagggcagcaaggcacgtcacacgcgcattcaggcgttctacgaggccctggagcggccaccagtgggccacgtcaccatcagcccgcaagcggtcgagccacgcgcctatgcaccgcagggattggccgaaaagctgggaatctcaaagcgcgttgagacgccggaagccgtggccgaccggctgacaaaagcggttcggcaggggtatgagcctgccctacaggccgccgcaggagcgcgtgagatgcgcaagaaggccgatcaagcccaagagacggcccgtgaccttcgggagcgcctgaagcccgttctggacgccctggggccgttgaatcgggatatgcaggccaaggccgccgcgatcatcaaggccgtgggcgaaaagctgctgacggaacagcgggaagtccagcgccagaaacaggcccagcgccagcaggaacgcgggcgcgcacatttccccgaaaagtgccacctgggatgaatgtcagctactgggctatctggacaagggaaaacgcaagcgcaaagagaaagcaggtagcttgcagtgggcttacatggcgatagctagactgggcggttttatggacagcaagcgaaccggaattgccagctggggcgccctctggtaaggttgggaagccctgcaaagtaaactggatggctttcttgccgccaaggatctgatggcgcaggggatcaagatctgatcaagagacaggatgaggatcgtttcgcatgattgaacaagatggattgcacgcaggttctccggccgcttgggtggagaggctattcggctatgactgggcacaacagacaatcggctgctctgatgccgccgtgttccggctgtcagcgcaggggcgcccggttctttttgtcaagaccgacctgtccggtgccctgaatgaactgcaagacgaggcagcgcggctatcgtggctggccacgacgggcgttccttgcgcagctgtgctcgacgttgtcactgaagcgggaagggactggctgctattgggcgaagtgccggggcaggatctcctgtcatctcaccttgctcctgccgagaaagtatccatcatggctgatgcaatgcggcggctgcatacgcttgatccggctacctgcccattcgaccaccaagcgaaacatcgcatcgagcgagcacgtactcggatggaagccggtcttgtcgatcaggatgatctggacgaagagcatcaggggctcgcgccagccgaactgttcgccaggctcaaggcgcgcatgcccgacggcgaggatctcgtcgtgacccatggcgatgcctgcttgccgaatatcatggtggaaaatggccgcttttctggattcatcgactgtggccggctgggtgtggcggaccgctatcaggacatagcgttggctacccgtgatattgctgaagagcttggcggcgaatgggctgaccgcttcctcgtgctttacggtatcgccgctcccgattcgcagcgcatcgccttctatcgccttcttgacgagttcttctgagcgggactctggggttcgaaatgaccgaccaagcgacgcccaacctgccatcacgagatttcgattccaccgccgccttctatgaaaggttgggcttcggaatcgttttccgggacgccggctggatgatcctccagcgcggggatctcatgctggagttcttcgcccacccccatgggcaaatattatacgcaaggcgacaaggtgctgatgccgctggcgattcaggttcatcatgccgtttgtgatggcttccatgtcggcagaatgcttaatgaattacaacagtttttatgcatgcgcccaatacgcaaaccgcctctccccgcgcgttggccgattcattaatgcagctggcacgacaggtttcccgactggtggataaccgtattaccgcctttgagtgagctgataccgctcgccgcagccgaacgaccgagcgcagcgagtcagtgagcgaggacacaagctttgacagctagctcagtcctaggtataatactagcgtcgacgtggagatataccatgggtgaactgccgagtaggtagctgataacttcgaaggctgcgcgcatttcttcctggctgcgtgaactgccgagtaggtagctgataacggatccgaattcgagcgaaggagatatacatatgtttttgcaaagacctaaaccttacagcgatgaaagtttagaaagtttctttatccgagtggctaacaaaaatggctacggtgatgtccatcgcttcctagaagccactaaacgattccttcaagacattgaccataatggctatcaaacctttccgactgatataactcggataaacccatactcagctaaaaacagttccagcgcacgaactgcgtcattcctgaaacttgcacaattgacatttaatgaaccgccagagctacttgggttggcaattaacagaacaaacatgaaatactcgccgtcaactagcgcggttgttagaggtgcagaagtctttcctcgcagtttactacggacgcactccatcccctgctgtcctttgtgtctgcgagaaaatggctacgcctcctacctttggcactttcaggggtacgaatactgccacagccataacgtacctttaattaccacttgtagctgtggtaaggagtttgactaccgagtatctgggttaaagggcatttgctgcaaatgcaaggagcctatcaccttaaccagcagggagaacggtcatgaggcagcgtgtactgtttcaaactggcttgctggccatgaatctaaacctctgccaaatcttcctaaaagctaccgatggggtttagttcattggtggatgggtattaaagatagcgagttcgatcacttttcgttcgttcaatttttctcaaactggccaaggtcattccactcgataatcgaagatgaagtagagttcaaccttgagcatgctgttgtcagcacgtctgaattacgactaaaagatcttcttggtcgattgtttttcggttcaattcggttacctgagcggaatcttcaacacaatatcatccttggtgagcttctctgctatttagaaaatcgtttatggcaagacaagggattaatcgccaacctcaaaatgaacgcgttagaggcgactgtaatgttaaattgtagcctcgatcagattgcatcaatggttgaacaacgcatcttgaagccaaatcgaaaaagcaagcccaacagccctcttgatgttaccgattatctatttcatttcggcgatattttctgtctttggttagctgagttccaaagcgatgagtttaaccgttcgttttatgtgtcgaggtggtaaatgcaaactctgaaagaactaatcgcatccaatcctgacgacttaacaactgaacttaagagagcatttcgtccactcacaccgcatattgcaattgatggtaatgaacttgacgcactgacgatattagtcaatttaaccgataagactgatgatcagaaagacctgctcgatcgagccaaatgcaagcaaaaacttcgagatgaaaaatggtgggctagctgcataaattgcgttaattacagacaaagccataacccaaaattcccggatatacgttctgaaggcgtgattcgaacccaagccctgggtgaattaccgagtttcctactctcgtcctcaaaaatcccaccataccattggtcatatagccatgattcaaaatacgtcaacaaaagcgcattcctcaccaatgagttttgttgggatggtgagatctcatgtttgggtgagcttcttaaagatgcagatcacccactttggaatactttgaaaaagttaggttgttctcaaaaaacttgcaaagcaatggcaaaacaactagctgatattactctcacgactatcaatgtcacactcgcaccaaattacctgactcaaatatctctccccgatagtgatacatcctacatttcactctctcctgttgcatcgctatcgatgcaaagccactttcatcagaggctccaagatgaaaatcggcatagcgcgataacgcggtttagccgaactaccaacatgggggtcactgcgatgacatgtggcggcgcatttagaatgttaaagtctggcgctaagttttccagcccccctcatcaccgattaaacagtaaacgaagttggttgacgtcagagcatgttcagtcattaaaacagtaccagcgcctcaacaaaagcctcatacctgaaaactctcggattgcactccgtagaaaatacaaaatcgagcttcaaaatatggtcagatcttggtttgcaatgcaagaccatacccttgattcgaacatacttatccaacatttgaatcatgacctatcttacttaggagccacaaaacgttttgcatacgatccagcgatgaccaagctctttactgagcttttgaaacgagagttatcaaattcaatcaataatggtgagcaacacactaatggatcgtttttagtcctaccgaatatcagggtttgtggcgcaacagctttaagctccccggtaacggtggggattccatcacttacagctttctttggcttcgttcacgcatttgaacggaatataaatcgcaccacctcatcgtttcgtgttgaatcctttgcgatatgcgtccatcaactacatgtcgagaagcgaggtttgacagcagagtttgtggaaaaaggcgacgggactatatccgctcccgcgacccgggatgactggcagtgtgatgtcgtatttagccttattttgaacaccaactttgctcaacatattgaccaagatacgttagttacatcactaccaaagcgattggctcggggttcagcaaaaattgcgattgatgactttaaacatatcaactcattctcgacattagaaacagcgatcgaatctctgccaatagaagctggtaggtggttatcactttacgcacagtcaaacaataatctaagtgatctattagcagccatgacagaggaccatcagctcatggcaagctgcgtcggttaccacttgttagaagagcccaaagataaaccaaactccctcagaggttacaaacacgctatcgccgagtgcatcattggactcattaactcaatcacctttagctcagagactgatcccaacacaatcttttggtcgctaaagaactatcaaaactacctagtggtacagccaaggagtatcaacgatgaaactaccgacaaatctagcctatgagcgctctatcgacccatcagatgtctgtttttttgtcgtctggcccgatgatagaaaaacacctttaacctacaattctcgtactctgctcgggcaaatggaagcggcatcattagcctatgatgtctcaggtcaaccaataaaaagtgccaccgctgaggcgttagctcaagggaaccctcatcaagttgatttctgccacgttccatacggtgcgagtcatattgaatgcagtttctccgtctcgttttcttctgaactacgtcaaccatataagtgtaactcaagcaaagttaaacaaacgctagtgcaattagtcgagctctacgaaacgaaaatcggctggactgagctagcaacccgatatttgatgaacatttgcaacggtaaatggctgtggaaaaatacccgtaaagcctattgctggaacattgtacttacaccttggccttggaacggggaaaaggttggatttgaagatattcgtactaactacacctcacggcaagactttaaaaataataaaaattggtctgctatagttgaaatgatcaaaaccgcattttctagtactgatgggctggcgatatttgaagtcagggccaccttgcacttgccaacgaatgctatggtgcggccaagccaagttttcacagaaaaagaaagtggcagtaaaagtaaatctaaaactcaaaacagtcgagtttttcagagtacaactattgatggtgaacgatcgccaatactaggggcctttaaaacgggagcagctattgcaaccattgacgactggtatcctgaagccactgagccactaagggtcggacggtttggggttcatcgcgaagatgtcacttgctaccgtcatccgtctaccggaaaagattttttctcgatattacaacaagcagagcactatattgaagtgttgagcgccaacaaaactcccgctcaagaaactatcaacgacatgcactttttaatggctaacctgattaagggtgggatgttccagcataaaggagactgactgtgaaatggtattataagacaatcacctttctgccagagttgtgcaacaacgagtcactggctgcaaagtgtctccgcgttctgcatggatttaactatcagtatgagacacgaaatatcggcgtttcatttccgctttggtgtgatgcaacggttggaaaaaagatttcatttgtcagcaagaacaagatagaactcgacttactacttaaacaacactatttcgtccaaatggaacaacttcaatactttcatatatccaacactgttctcgtcccagaagattgtacatacgtttcctttagacgctgtcaatctatagataagctcacagcagcagggctggcaaggaaaatcagacgcctggagaaacgtgctctatctagaggcgagcaatttgacccatcatcttttgctcaaaaagagcatactgcaatagcgcactaccactcacttggggagtccagcaaacagacgaaccgcaactttcgactcaatatcaggatgctctcggagcaaccccgtgaggggaactcgatttttagtagctatggcttatcaaattcagaaaactcgtttcagcctgtacccttaatctgacctttaataaggagatataccatggcgacaagtttacctacgccctcagcaattacgacttcggcgttagagtatgcattccatactcccgctcgcaatctaacgaaatctcgcggaaaaaacattcatcgttatgtcagtgtaaagatgagtaagaggattacggtagaatctactctagagtgtgatgcctgctatcactttgattttgagccaagtattgttcgcttttgcgctcaaccgattcgatttttatattatctcaatggtcagtctcactcctatgttcctgactttctagttcaatttgataccaacgagtttgttctatatgaagtaaagtcagcttatgctaagaacaaacctgattttgatgttgaatgggaggcgaaagtaaaagcagcaactgaactagggctagaattggagcttgttgaagagagtgatattagggatacggttgtattaaataatcttaagcgcatgcatcgttatgcttcgaaagatgagctgaataacgtacataactctctcttaaaaataataaagtacaatggcgcccaatctgcaagatgcttgggagaacagttgggtttaaaaggccgaactgttttaccaattttgtgcgatttgctgtcaaggtgtttactcgatacacgtttggataagcctctatctcttgaatctcgatttgagttggccagttatggctaagaaagggttctcaagtttccatagaaaagcagtctcttcccaagatacgcttgaatcgatagagcttgtctctagcgctaattgtctagaaagtgttacgtatcaagatatatcagcatttcccgaaacaattgcggtagagattaatttccgattaagcattcttcgctttttagcgcgaaagtgcgaaaccattgtggccaaatcaattgaaccacatcgtgtagagctacagcaaaactatagtagaaaaatacccagtgcaataacgatatatcgatggtggcttgcttttcgaaaatcagactacaaccccattagcttagcacctaatatcaaggatagaggtaatagagagacaaaagtgtcaacagttgttgattctattatggaacaggcagttgaaagagttatatctggacgaaaagtcaatgttagctctgcatataaacgtgttcgacgaaaagttcgtcaatacaatctaactcatggaacgaaatacacgtatcctaagtacgaatctgtaagaaagcgagtaaaaaagaaaaccccatttgagttattagccgcagggaaaggggagagagtagctaagagagagtttcgccgaatgggaaaaaagatcctcacgtctagcgtgctagagagggttgaaatagatcacactgtcgttgacctttttgcagtacacgaagagtatcgaatcccattgggccgaccttggcttactcaattggttgattgttacagtaaagctgtaatcggtttttatttaggtttcgagcctcctagctatgtgtcggtttcccttgcacttaagaatgcaatacaacgcaaagatgacttaatctcctcgtatgaatcgatcgagaatgaatggctatgttatggcatcccagacctactcgtaactgataatggtaaagagtttttgtcgaaagcatttgatcaagcatgtgaatcactattgatcaatgtgcatcaaaataaagttgagacgcccgacaacaaacctcatgttgaacgtaactacgggactattaatacttctctgttagacgatttacctgggaaatccttcagccagtaccttcaaagagaagggtacgactctgtgggagaagctacccttacactcaatgagattagagaaatttacttaatttggttggtggatatttatcataaaaaacccaatcagagaggcactaattgtcctaatgttgcgtggaaaaagggttgtcaagaatgggaaccagaggagttctctggttctaaagacgaattagactttaaatttgctattgttgattacaaacaacttactaaagtagggataactgtctacaaagaactgagttatagcaatgaccgtttagctgaatatagagggaagaaaggaaaccataaagttcagttcaagtataaccctgagtgtatggcagttatttgggtgttggatgaggatatgaatgagtactttacagttaatgcgattgactacgaatatgcaagtagagtatcactttggcaacataaatataacatgaaatatcaagcagaactaaattcagcagaatatgatgaggacaaggaaattgatgcagaaataaaaattgaagaaatcgcagatcgttcaattgttaagactaacaaaatcagagctcggaggcgtggcgctaggcatcaagagaatagcgcaagggctaagtcaatcagtaatgcgaacccggcctcgatacaaaaacatgaagatgaaatcgttagtgcagataatgacgattgggatattgattatgtctgagaaatcgtcaaatgagtgaaacgcgtgaggctcgtatatcaagagctaaaagggcatttgtatccacaccgagcgttaggaaaatcttgagttacatggatagatgtagagatctatcagacctagagtctgagcctacatgcatgatggtctatggtgcttcgggtgtaggtaaaacgaccgtcatcaagaaatacttaaatcaaaacagaagagagtccgaagccgggggcgatataataccggttttgcatattgagttgccagacaatgcgaagccagtagatgcagcaagggaattgctggttgaaatgggtgacccgctagcactttatgaaactgacttagctagattgacgaaaagactgactgaattaatccctgcggtcggcgtgaagctgattattatcgatgagttccaacatttggtggaagaaaggtcaaatcgggttcttacccaagtaggtaattggctaaaaatgatacttaacaaaacgaaatgtccaattgttatatttggtatgccatactcaaaagttgtactgcaagcaaactcgcaacttcacgggcgattttccattcaggttgaactgcgcccctttagctaccagggaggtagaggtgtatttaaaacttttttggaataccttgataaagccctaccttttgaaaaacaggctggcttagccaacgaaagtttgcagaaaaaattgtatgcattctctcagggaaacatgcgttcgttgagaaaccttatttatcaagcatctatcgaagcaattgataatcagcatgagacgataaccgaagaagatttcgtttttgcatcgaagttgacatcgggcgataaacccaactcatggaaaaatccttttgaggagggtgttgaggtaacagaagatatgttacgaccgccaccaaaagatattggttgggaggactatttgagacattcaaccccgagagtgagtaaaccaggtagaaataaaaactttttcgaataacctaggctgctgcgctgctgccaccgctgagcaataactagcataaccccttggggcctctaaacgggtcttgaggggttttttgctgaaacctcaggcatgttggaacaaccataaaatgataattacacccataaattgataattatcacacccataaattgatattgcctcttcatggtctaaacttcagtaagtttacgacattttcatgaagaggtcatttccggggatccatggagaaaaaaatcactggatataccaccgttgatatatcccaatggcatcgtaaagaacattttgaggcatttcagtcagttgctcaatgtacctataaccagaccgttcagctggatattacggcctttttaaagaccgtaaagaaaaataagcacaagttttatccggcctttattcacattcttgcccgcctgatgaatgctcatccggagttccgtatggcaatgaaagacggtgagctggtgatatgggatagtgttcacccttgttacaccgttttccatgagcaaactgaaacgttttcatcgctctggagtgaataccacgacgatttccggcagtttctacacatatattcgcaagatgtggcgtgttacggtgaaaacctggcctatttccctaaagggtttattgagaatatgtttttcgtctcagccaatccctgggtgagtttcaccagttttgatttaaacgtggccaatatggacaacttcttcgcccccgttttcactatgggcaaatattatacgcaaggcgacaaggtgctgatgccgctggcgattcaggttcatcatgccgtttgtgatggcttccatgtcggcagaatgcttaatgaattacaacagtactgcgatgagtggcagggcggggcgtaatttttttaaggcagttattggtgcccttctagagtccttactgcagtagttttgctgaaatactcgattcacaaaaatatcaacttatggttgttttgtgagatatcaatatatggttgttttgtggttaagttgctgattataaataattattaaatatcactttatggttgcatcaacaggtaccgagctcgaattcactggccgtcgttttacaacgtcgtgactgggaaaaccctggcgttacccaacttaatcgccttgcggccagtttgctcaggctctccccgtggaggtaataattgacgatatgatcatttattctgcctcccagagcctgataaaaacggtgaatccgttagcgaggtgccgccggcttccattcaggtcgaggtggcccggctccatgcaccgcgacgcaacgcggggaggcagacaaggtatagggcggcgaggcggctacagccgatagtctggaacagcgcacttacgggttgctgcgcaacccaagtgctaccggcgcggcagcgtgacccgtgtcggcggctccaacggctcgccatcgtccagaaaacacggctcatcgggcatcggcaggcgctgctgcccgcgccgttcccattcctccgtttcggtcaaggctggcaggtctggttccatgcccggaatgccgggctggctgggcggctcctcgccggggccggtcggtagttgctgctcgcccggatacagggtcgggatgcggcgcaggtcgccatgccccaacagcgattcgtcctggtcgtcgtgatcaaccaccacggcggcactgaacaccgacaggcgcaactggtcgcggggctggccccacgccacgcggtcattgaccacgtaggccgacacggtgccggggccgttgagcttcacgacggagatccagcgctcggccaccaagtccttgactgcgtattggaccgtccgcaaagaacgtccgatgagcttggaaagtgtcttctggctgaccaccacggcgttctggtggcccatctgcgccacgaggtgatgcagcagcattg

SEQ ID NO: 108 - DNA, 14028 bp, artificial sequence
  Synthetic
ccgccgtgggtttcctcgcaataagcccggcccacgcctcatgcgctttgcgttccgtttgcacccagtgaccgggcttgttcttggcttgaatgccgatttctctggactgcgtggccatgcttatctccatgcggtaggggtgccgcacggttgcggcaccatgcgcaatcagctgcaacttttcggcagcgcgacaacaattatgcgttgcgtaaaagtggcagtcaattacagattttctttaacctacgcaatgagctattgcggggggtgccgcaatgagctgttgcgtaccccccttttttaagttgttgatttttaagtctttcgcatttcgccctatatctagttctttggtgcccaaagaagggcacccctgcggggttcccccacgccttcggcgcggctccccctccggcaaaaagtggcccctccggggcttgttgatcgactgcgcggccttcggccttgcccaaggtggcgctgcccccttggaacccccgcactcgccgccgtgaggctcggggggcaggcgggcgggcttcgcccttcgactgcccccactcgcataggcttgggtcgttccaggcgcgtcaaggccaagccgctgcgcggtcgctgcgcgagccttgacccgccttccacttggtgtccaaccggcaagcgaagcgcgcaggccgcaggccggaggcttttccccagagaaaattaaaaaaattgatggggcaaggccgcaggccgcgcagttggagccggtgggtatgtggtcgaaggctgggtagccggtgggcaatccctgtggtcaagctcgtgggcaggcgcagcctgtccatcagcttgtccagcagggttgtccacgggccgagcgaagcgagccagccggtggccgctcgcggccatcgtccacatatccacgggctggcaagggagcgcagcgaccgcgcagggcgaagcccggagagcaagcccgtagggcgccgcagccgccgtaggcggtcacgactttgcgaagcaaagtctagtgagtatactcaagcattgagtggcccgccggaggcaccgccttgcgctgcccccgtcgagccggttggacaccaaaagggaggggcaggcatggcggcatacgcgatcatgcgatgcaagaagctggcgaaaatgggcaacgtggcggccagtctcaagcacgcctaccgcgagcgcgagacgcccaacgctgacgccagcaggacgccagagaacgagcactgggcggccagcagcaccgatgaagcgatgggccgactgcgcgagttgctgccagagaagcggcgcaaggacgctgtgttggcggtcgagtacgtcatgacggccagcccggaatggtggaagtcggccagccaagaacagcaggcggcgttcttcgagaaggcgcacaagtggctggcggacaagtacggggcggatcgcatcgtgacggccagcatccaccgtgacgaaaccagcccgcacatgaccgcgttcgtggtgccgctgacgcaggacggcaggctgtcggccaaggagttcatcggcaacaaagcgcagatgacccgcgaccagaccacgtttgcggccgctgtggccgatctagggctgcaacggggcatcgagggcagcaaggcacgtcacacgcgcattcaggcgttctacgaggccctggagcggccaccagtgggccacgtcaccatcagcccgcaagcggtcgagccacgcgcctatgcaccgcagggattggccgaaaagctgggaatctcaaagcgcgttgagacgccggaagccgtggccgaccggctgacaaaagcggttcggcaggggtatgagcctgccctacaggccgccgcaggagcgcgtgagatgcgcaagaaggccgatcaagcccaagagacggcccgtgaccttcgggagcgcctgaagcccgttctggacgccctggggccgttgaatcgggatatgcaggccaaggccgccgcgatcatcaaggccgtgggcgaaaagctgctgacggaacagcgggaagtccagcgccagaaacaggcccagcgccagcaggaacgcgggcgcgcacatttccccgaaaagtgccacctgggatgaatgtcagctactgggctatctggacaagggaaaacgcaagcgcaaagagaaagcaggtagcttgcagtgggcttacatggcgatagctagactgggcggttttatggacagcaagcgaaccggaattgccagctggggcgccctctggtaaggttgggaagccctgcaaagtaaactggatggctttcttgccgccaaggatctgatggcgcaggggatcaagatctgatcaagagacaggatgaggatcgtttcgcatgattgaacaagatggattgcacgcaggttctccggccgcttgggtggagaggctattcggctatgactgggcacaacagacaatcggctgctctgatgccgccgtgttccggctgtcagcgcaggggcgcccggttctttttgtcaagaccgacctgtccggtgccctgaatgaactgcaagacgaggcagcgcggctatcgtggctggccacgacgggcgttccttgcgcagctgtgctcgacgttgtcactgaagcgggaagggactggctgctattgggcgaagtgccggggcaggatctcctgtcatctcaccttgctcctgccgagaaagtatccatcatggctgatgcaatgcggcggctgcatacgcttgatccggctacctgcccattcgaccaccaagcgaaacatcgcatcgagcgagcacgtactcggatggaagccggtcttgtcgatcaggatgatctggacgaagagcatcaggggctcgcgccagccgaactgttcgccaggctcaaggcgcgcatgcccgacggcgaggatctcgtcgtgacccatggcgatgcctgcttgccgaatatcatggtggaaaatggccgcttttctggattcatcgactgtggccggctgggtgtggcggaccgctatcaggacatagcgttggctacccgtgatattgctgaagagcttggcggcgaatgggctgaccgcttcctcgtgctttacggtatcgccgctcccgattcgcagcgcatcgccttctatcgccttcttgacgagttcttctgagcgggactctggggttcgaaatgaccgaccaagcgacgcccaacctgccatcacgagatttcgattccaccgccgccttctatgaaaggttgggcttcggaatcgttttccgggacgccggctggatgatcctccagcgcggggatctcatgctggagttcttcgcccacccccatgggcaaatattatacgcaaggcgacaaggtgctgatgccgctggcgattcaggttcatcatgccgtttgtgatggcttccatgtcggcagaatgcttaatgaattacaacagtttttatgcatgcgcccaatacgcaaaccgcctctccccgcgcgttggccgattcattaatgcagctggcacgacaggtttcccgactggtggataaccgtattaccgcctttgagtgagctgataccgctcgccgcagccgaacgaccgagcgcagcgagtcagtgagcgaggacacaagctttgacagctagctcagtcctaggtataatactagcgtcgacgtggagatataccatgggtgaactgccgagtaggtagctgataacggaagatactgttcgataaacgaacacacatggtgaactgccgagtaggtagctgataacggatccgaattcgagcgaaggagatatacatatgtttttgcaaagacctaaaccttacagcgatgaaagtttagaaagtttctttatccgagtggctaacaaaaatggctacggtgatgtccatcgcttcctagaagccactaaacgattccttcaagacattgaccataatggctatcaaacctttccgactgatataactcggataaacccatactcagctaaaaacagttccagcgcacgaactgcgtcattcctgaaacttgcacaattgacatttaatgaaccgccagagctacttgggttggcaattaacagaacaaacatgaaatactcgccgtcaactagcgcggttgttagaggtgcagaagtctttcctcgcagtttactacggacgcactccatcccctgctgtcctttgtgtctgcgagaaaatggctacgcctcctacctttggcactttcaggggtacgaatactgccacagccataacgtacctttaattaccacttgtagctgtggtaaggagtttgactaccgagtatctgggttaaagggcatttgctgcaaatgcaaggagcctatcaccttaaccagcagggagaacggtcatgaggcagcgtgtactgtttcaaactggcttgctggccatgaatctaaacctctgccaaatcttcctaaaagctaccgatggggtttagttcattggtggatgggtattaaagatagcgagttcgatcacttttcgttcgttcaatttttctcaaactggccaaggtcattccactcgataatcgaagatgaagtagagttcaaccttgagcatgctgttgtcagcacgtctgaattacgactaaaagatcttcttggtcgattgtttttcggttcaattcggttacctgagcggaatcttcaacacaatatcatccttggtgagcttctctgctatttagaaaatcgtttatggcaagacaagggattaatcgccaacctcaaaatgaacgcgttagaggcgactgtaatgttaaattgtagcctcgatcagattgcatcaatggttgaacaacgcatcttgaagccaaatcgaaaaagcaagcccaacagccctcttgatgttaccgattatctatttcatttcggcgatattttctgtctttggttagctgagttccaaagcgatgagtttaaccgttcgttttatgtgtcgaggtggtaaatgcaaactctgaaagaactaatcgcatccaatcctgacgacttaacaactgaacttaagagagcatttcgtccactcacaccgcatattgcaattgatggtaatgaacttgacgcactgacgatattagtcaatttaaccgataagactgatgatcagaaagacctgctcgatcgagccaaatgcaagcaaaaacttcgagatgaaaaatggtgggctagctgcataaattgcgttaattacagacaaagccataacccaaaattcccggatatacgttctgaaggcgtgattcgaacccaagccctgggtgaattaccgagtttcctactctcgtcctcaaaaatcccaccataccattggtcatatagccatgattcaaaatacgtcaacaaaagcgcattcctcaccaatgagttttgttgggatggtgagatctcatgtttgggtgagcttcttaaagatgcagatcacccactttggaatactttgaaaaagttaggttgttctcaaaaaacttgcaaagcaatggcaaaacaactagctgatattactctcacgactatcaatgtcacactcgcaccaaattacctgactcaaatatctctccccgatagtgatacatcctacatttcactctctcctgttgcatcgctatcgatgcaaagccactttcatcagaggctccaagatgaaaatcggcatagcgcgataacgcggtttagccgaactaccaacatgggggtcactgcgatgacatgtggcggcgcatttagaatgttaaagtctggcgctaagttttccagcccccctcatcaccgattaaacagtaaacgaagttggttgacgtcagagcatgttcagtcattaaaacagtaccagcgcctcaacaaaagcctcatacctgaaaactctcggattgcactccgtagaaaatacaaaatcgagcttcaaaatatggtcagatcttggtttgcaatgcaagaccatacccttgattcgaacatacttatccaacatttgaatcatgacctatcttacttaggagccacaaaacgttttgcatacgatccagcgatgaccaagctctttactgagcttttgaaacgagagttatcaaattcaatcaataatggtgagcaacacactaatggatcgtttttagtcctaccgaatatcagggtttgtggcgcaacagctttaagctccccggtaacggtggggattccatcacttacagctttctttggcttcgttcacgcatttgaacggaatataaatcgcaccacctcatcgtttcgtgttgaatcctttgcgatatgcgtccatcaactacatgtcgagaagcgaggtttgacagcagagtttgtggaaaaaggcgacgggactatatccgctcccgcgacccgggatgactggcagtgtgatgtcgtatttagccttattttgaacaccaactttgctcaacatattgaccaagatacgttagttacatcactaccaaagcgattggctcggggttcagcaaaaattgcgattgatgactttaaacatatcaactcattctcgacattagaaacagcgatcgaatctctgccaatagaagctggtaggtggttatcactttacgcacagtcaaacaataatctaagtgatctattagcagccatgacagaggaccatcagctcatggcaagctgcgtcggttaccacttgttagaagagcccaaagataaaccaaactccctcagaggttacaaacacgctatcgccgagtgcatcattggactcattaactcaatcacctttagctcagagactgatcccaacacaatcttttggtcgctaaagaactatcaaaactacctagtggtacagccaaggagtatcaacgatgaaactaccgacaaatctagcctatgagcgctctatcgacccatcagatgtctgtttttttgtcgtctggcccgatgatagaaaaacacctttaacctacaattctcgtactctgctcgggcaaatggaagcggcatcattagcctatgatgtctcaggtcaaccaataaaaagtgccaccgctgaggcgttagctcaagggaaccctcatcaagttgatttctgccacgttccatacggtgcgagtcatattgaatgcagtttctccgtctcgttttcttctgaactacgtcaaccatataagtgtaactcaagcaaagttaaacaaacgctagtgcaattagtcgagctctacgaaacgaaaatcggctggactgagctagcaacccgatatttgatgaacatttgcaacggtaaatggctgtggaaaaatacccgtaaagcctattgctggaacattgtacttacaccttggccttggaacggggaaaaggttggatttgaagatattcgtactaactacacctcacggcaagactttaaaaataataaaaattggtctgctatagttgaaatgatcaaaaccgcattttctagtactgatgggctggcgatatttgaagtcagggccaccttgcacttgccaacgaatgctatggtgcggccaagccaagttttcacagaaaaagaaagtggcagtaaaagtaaatctaaaactcaaaacagtcgagtttttcagagtacaactattgatggtgaacgatcgccaatactaggggcctttaaaacgggagcagctattgcaaccattgacgactggtatcctgaagccactgagccactaagggtcggacggtttggggttcatcgcgaagatgtcacttgctaccgtcatccgtctaccggaaaagattttttctcgatattacaacaagcagagcactatattgaagtgttgagcgccaacaaaactcccgctcaagaaactatcaacgacatgcactttttaatggctaacctgattaagggtgggatgttccagcataaaggagactgactgtgaaatggtattataagacaatcacctttctgccagagttgtgcaacaacgagtcactggctgcaaagtgtctccgcgttctgcatggatttaactatcagtatgagacacgaaatatcggcgtttcatttccgctttggtgtgatgcaacggttggaaaaaagatttcatttgtcagcaagaacaagatagaactcgacttactacttaaacaacactatttcgtccaaatggaacaacttcaatactttcatatatccaacactgttctcgtcccagaagattgtacatacgtttcctttagacgctgtcaatctatagataagctcacagcagcagggctggcaaggaaaatcagacgcctggagaaacgtgctctatctagaggcgagcaatttgacccatcatcttttgctcaaaaagagcatactgcaatagcgcactaccactcacttggggagtccagcaaacagacgaaccgcaactttcgactcaatatcaggatgctctcggagcaaccccgtgaggggaactcgatttttagtagctatggcttatcaaattcagaaaactcgtttcagcctgtacccttaatctgacctttaataaggagatataccatggcgacaagtttacctacgccctcagcaattacgacttcggcgttagagtatgcattccatactcccgctcgcaatctaacgaaatctcgcggaaaaaacattcatcgttatgtcagtgtaaagatgagtaagaggattacggtagaatctactctagagtgtgatgcctgctatcactttgattttgagccaagtattgttcgcttttgcgctcaaccgattcgatttttatattatctcaatggtcagtctcactcctatgttcctgactttctagttcaatttgataccaacgagtttgttctatatgaagtaaagtcagcttatgctaagaacaaacctgattttgatgttgaatgggaggcgaaagtaaaagcagcaactgaactagggctagaattggagcttgttgaagagagtgatattagggatacggttgtattaaataatcttaagcgcatgcatcgttatgcttcgaaagatgagctgaataacgtacataactctctcttaaaaataataaagtacaatggcgcccaatctgcaagatgcttgggagaacagttgggtttaaaaggccgaactgttttaccaattttgtgcgatttgctgtcaaggtgtttactcgatacacgtttggataagcctctatctcttgaatctcgatttgagttggccagttatggctaagaaagggttctcaagtttccatagaaaagcagtctcttcccaagatacgcttgaatcgatagagcttgtctctagcgctaattgtctagaaagtgttacgtatcaagatatatcagcatttcccgaaacaattgcggtagagattaatttccgattaagcattcttcgctttttagcgcgaaagtgcgaaaccattgtggccaaatcaattgaaccacatcgtgtagagctacagcaaaactatagtagaaaaatacccagtgcaataacgatatatcgatggtggcttgcttttcgaaaatcagactacaaccccattagcttagcacctaatatcaaggatagaggtaatagagagacaaaagtgtcaacagttgttgattctattatggaacaggcagttgaaagagttatatctggacgaaaagtcaatgttagctctgcatataaacgtgttcgacgaaaagttcgtcaatacaatctaactcatggaacgaaatacacgtatcctaagtacgaatctgtaagaaagcgagtaaaaaagaaaaccccatttgagttattagccgcagggaaaggggagagagtagctaagagagagtttcgccgaatgggaaaaaagatcctcacgtctagcgtgctagagagggttgaaatagatcacactgtcgttgacctttttgcagtacacgaagagtatcgaatcccattgggccgaccttggcttactcaattggttgattgttacagtaaagctgtaatcggtttttatttaggtttcgagcctcctagctatgtgtcggtttcccttgcacttaagaatgcaatacaacgcaaagatgacttaatctcctcgtatgaatcgatcgagaatgaatggctatgttatggcatcccagacctactcgtaactgataatggtaaagagtttttgtcgaaagcatttgatcaagcatgtgaatcactattgatcaatgtgcatcaaaataaagttgagacgcccgacaacaaacctcatgttgaacgtaactacgggactattaatacttctctgttagacgatttacctgggaaatccttcagccagtaccttcaaagagaagggtacgactctgtgggagaagctacccttacactcaatgagattagagaaatttacttaatttggttggtggatatttatcataaaaaacccaatcagagaggcactaattgtcctaatgttgcgtggaaaaagggttgtcaagaatgggaaccagaggagttctctggttctaaagacgaattagactttaaatttgctattgttgattacaaacaacttactaaagtagggataactgtctacaaagaactgagttatagcaatgaccgtttagctgaatatagagggaagaaaggaaaccataaagttcagttcaagtataaccctgagtgtatggcagttatttgggtgttggatgaggatatgaatgagtactttacagttaatgcgattgactacgaatatgcaagtagagtatcactttggcaacataaatataacatgaaatatcaagcagaactaaattcagcagaatatgatgaggacaaggaaattgatgcagaaataaaaattgaagaaatcgcagatcgttcaattgttaagactaacaaaatcagagctcggaggcgtggcgctaggcatcaagagaatagcgcaagggctaagtcaatcagtaatgcgaacccggcctcgatacaaaaacatgaagatgaaatcgttagtgcagataatgacgattgggatattgattatgtctgagaaatcgtcaaatgagtgaaacgcgtgaggctcgtatatcaagagctaaaagggcatttgtatccacaccgagcgttaggaaaatcttgagttacatggatagatgtagagatctatcagacctagagtctgagcctacatgcatgatggtctatggtgcttcgggtgtaggtaaaacgaccgtcatcaagaaatacttaaatcaaaacagaagagagtccgaagccgggggcgatataataccggttttgcatattgagttgccagacaatgcgaagccagtagatgcagcaagggaattgctggttgaaatgggtgacccgctagcactttatgaaactgacttagctagattgacgaaaagactgactgaattaatccctgcggtcggcgtgaagctgattattatcgatgagttccaacatttggtggaagaaaggtcaaatcgggttcttacccaagtaggtaattggctaaaaatgatacttaacaaaacgaaatgtccaattgttatatttggtatgccatactcaaaagttgtactgcaagcaaactcgcaacttcacgggcgattttccattcaggttgaactgcgcccctttagctaccagggaggtagaggtgtatttaaaacttttttggaataccttgataaagccctaccttttgaaaaacaggctggcttagccaacgaaagtttgcagaaaaaattgtatgcattctctcagggaaacatgcgttcgttgagaaaccttatttatcaagcatctatcgaagcaattgataatcagcatgagacgataaccgaagaagatttcgtttttgcatcgaagttgacatcgggcgataaacccaactcatggaaaaatccttttgaggagggtgttgaggtaacagaagatatgttacgaccgccaccaaaagatattggttgggaggactatttgagacattcaaccccgagagtgagtaaaccaggtagaaataaaaactttttcgaataacctaggctgctgcgctgctgccaccgctgagcaataactagcataaccccttggggcctctaaacgggtcttgaggggttttttgctgaaacctcaggcatgttggaacaaccataaaatgataattacacccataaattgataattatcacacccataaattgatattgcctcttcatggtctaaacttcagtaagtttacgacattttcatgaagaggtcatttccggggatccatggagaaaaaaatcactggatataccaccgttgatatatcccaatggcatcgtaaagaacattttgaggcatttcagtcagttgctcaatgtacctataaccagaccgttcagctggatattacggcctttttaaagaccgtaaagaaaaataagcacaagttttatccggcctttattcacattcttgcccgcctgatgaatgctcatccggagttccgtatggcaatgaaagacggtgagctggtgatatgggatagtgttcacccttgttacaccgttttccatgagcaaactgaaacgttttcatcgctctggagtgaataccacgacgatttccggcagtttctacacatatattcgcaagatgtggcgtgttacggtgaaaacctggcctatttccctaaagggtttattgagaatatgtttttcgtctcagccaatccctgggtgagtttcaccagttttgatttaaacgtggccaatatggacaacttcttcgcccccgttttcactatgggcaaatattatacgcaaggcgacaaggtgctgatgccgctggcgattcaggttcatcatgccgtttgtgatggcttccatgtcggcagaatgcttaatgaattacaacagtactgcgatgagtggcagggcggggcgtaatttttttaaggcagttattggtgcccttctagagtccttactgcagtagttttgctgaaatactcgattcacaaaaatatcaacttatggttgttttgtgagatatcaatatatggttgttttgtggttaagttgctgattataaataattattaaatatcactttatggttgcatcaacaggtaccgagctcgaattcactggccgtcgttttacaacgtcgtgactgggaaaaccctggcgttacccaacttaatcgccttgcggccagtttgctcaggctctccccgtggaggtaataattgacgatatgatcatttattctgcctcccagagcctgataaaaacggtgaatccgttagcgaggtgccgccggcttccattcaggtcgaggtggcccggctccatgcaccgcgacgcaacgcggggaggcagacaaggtatagggcggcgaggcggctacagccgatagtctggaacagcgcacttacgggttgctgcgcaacccaagtgctaccggcgcggcagcgtgacccgtgtcggcggctccaacggctcgccatcgtccagaaaacacggctcatcgggcatcggcaggcgctgctgcccgcgccgttcccattcctccgtttcggtcaaggctggcaggtctggttccatgcccggaatgccgggctggctgggcggctcctcgccggggccggtcggtagttgctgctcgcccggatacagggtcgggatgcggcgcaggtcgccatgccccaacagcgattcgtcctggtcgtcgtgatcaaccaccacggcggcactgaacaccgacaggcgcaactggtcgcggggctggccccacgccacgcggtcattgaccacgtaggccgacacggtgccggggccgttgagcttcacgacggagatccagcgctcggccaccaagtccttgactgcgtattggaccgtccgcaaagaacgtccgatgagcttggaaagtgtcttctggctgaccaccacggcgttctggtggcccatctgcgccacgaggtgatgcagcagcattg

SEQ ID NO: 109 - DNA, 14028 bp, artificial sequence
  Synthetic
ccgccgtgggtttcctcgcaataagcccggcccacgcctcatgcgctttgcgttccgtttgcacccagtgaccgggcttgttcttggcttgaatgccgatttctctggactgcgtggccatgcttatctccatgcggtaggggtgccgcacggttgcggcaccatgcgcaatcagctgcaacttttcggcagcgcgacaacaattatgcgttgcgtaaaagtggcagtcaattacagattttctttaacctacgcaatgagctattgcggggggtgccgcaatgagctgttgcgtaccccccttttttaagttgttgatttttaagtctttcgcatttcgccctatatctagttctttggtgcccaaagaagggcacccctgcggggttcccccacgccttcggcgcggctccccctccggcaaaaagtggcccctccggggcttgttgatcgactgcgcggccttcggccttgcccaaggtggcgctgcccccttggaacccccgcactcgccgccgtgaggctcggggggcaggcgggcgggcttcgcccttcgactgcccccactcgcataggcttgggtcgttccaggcgcgtcaaggccaagccgctgcgcggtcgctgcgcgagccttgacccgccttccacttggtgtccaaccggcaagcgaagcgcgcaggccgcaggccggaggcttttccccagagaaaattaaaaaaattgatggggcaaggccgcaggccgcgcagttggagccggtgggtatgtggtcgaaggctgggtagccggtgggcaatccctgtggtcaagctcgtgggcaggcgcagcctgtccatcagcttgtccagcagggttgtccacgggccgagcgaagcgagccagccggtggccgctcgcggccatcgtccacatatccacgggctggcaagggagcgcagcgaccgcgcagggcgaagcccggagagcaagcccgtagggcgccgcagccgccgtaggcggtcacgactttgcgaagcaaagtctagtgagtatactcaagcattgagtggcccgccggaggcaccgccttgcgctgcccccgtcgagccggttggacaccaaaagggaggggcaggcatggcggcatacgcgatcatgcgatgcaagaagctggcgaaaatgggcaacgtggcggccagtctcaagcacgcctaccgcgagcgcgagacgcccaacgctgacgccagcaggacgccagagaacgagcactgggcggccagcagcaccgatgaagcgatgggccgactgcgcgagttgctgccagagaagcggcgcaaggacgctgtgttggcggtcgagtacgtcatgacggccagcccggaatggtggaagtcggccagccaagaacagcaggcggcgttcttcgagaaggcgcacaagtggctggcggacaagtacggggcggatcgcatcgtgacggccagcatccaccgtgacgaaaccagcccgcacatgaccgcgttcgtggtgccgctgacgcaggacggcaggctgtcggccaaggagttcatcggcaacaaagcgcagatgacccgcgaccagaccacgtttgcggccgctgtggccgatctagggctgcaacggggcatcgagggcagcaaggcacgtcacacgcgcattcaggcgttctacgaggccctggagcggccaccagtgggccacgtcaccatcagcccgcaagcggtcgagccacgcgcctatgcaccgcagggattggccgaaaagctgggaatctcaaagcgcgttgagacgccggaagccgtggccgaccggctgacaaaagcggttcggcaggggtatgagcctgccctacaggccgccgcaggagcgcgtgagatgcgcaagaaggccgatcaagcccaagagacggcccgtgaccttcgggagcgcctgaagcccgttctggacgccctggggccgttgaatcgggatatgcaggccaaggccgccgcgatcatcaaggccgtgggcgaaaagctgctgacggaacagcgggaagtccagcgccagaaacaggcccagcgccagcaggaacgcgggcgcgcacatttccccgaaaagtgccacctgggatgaatgtcagctactgggctatctggacaagggaaaacgcaagcgcaaagagaaagcaggtagcttgcagtgggcttacatggcgatagctagactgggcggttttatggacagcaagcgaaccggaattgccagctggggcgccctctggtaaggttgggaagccctgcaaagtaaactggatggctttcttgccgccaaggatctgatggcgcaggggatcaagatctgatcaagagacaggatgaggatcgtttcgcatgattgaacaagatggattgcacgcaggttctccggccgcttgggtggagaggctattcggctatgactgggcacaacagacaatcggctgctctgatgccgccgtgttccggctgtcagcgcaggggcgcccggttctttttgtcaagaccgacctgtccggtgccctgaatgaactgcaagacgaggcagcgcggctatcgtggctggccacgacgggcgttccttgcgcagctgtgctcgacgttgtcactgaagcgggaagggactggctgctattgggcgaagtgccggggcaggatctcctgtcatctcaccttgctcctgccgagaaagtatccatcatggctgatgcaatgcggcggctgcatacgcttgatccggctacctgcccattcgaccaccaagcgaaacatcgcatcgagcgagcacgtactcggatggaagccggtcttgtcgatcaggatgatctggacgaagagcatcaggggctcgcgccagccgaactgttcgccaggctcaaggcgcgcatgcccgacggcgaggatctcgtcgtgacccatggcgatgcctgcttgccgaatatcatggtggaaaatggccgcttttctggattcatcgactgtggccggctgggtgtggcggaccgctatcaggacatagcgttggctacccgtgatattgctgaagagcttggcggcgaatgggctgaccgcttcctcgtgctttacggtatcgccgctcccgattcgcagcgcatcgccttctatcgccttcttgacgagttcttctgagcgggactctggggttcgaaatgaccgaccaagcgacgcccaacctgccatcacgagatttcgattccaccgccgccttctatgaaaggttgggcttcggaatcgttttccgggacgccggctggatgatcctccagcgcggggatctcatgctggagttcttcgcccacccccatgggcaaatattatacgcaaggcgacaaggtgctgatgccgctggcgattcaggttcatcatgccgtttgtgatggcttccatgtcggcagaatgcttaatgaattacaacagtttttatgcatgcgcccaatacgcaaaccgcctctccccgcgcgttggccgattcattaatgcagctggcacgacaggtttcccgactggtggataaccgtattaccgcctttgagtgagctgataccgctcgccgcagccgaacgaccgagcgcagcgagtcagtgagcgaggacacaagctttgacagctagctcagtcctaggtataatactagcgtcgacgtggagatataccatgggtgaactgccgagtaggtagctgataactaagcgacaaacagaaggggtgccatgcaggagtgaactgccgagtaggtagctgataacggatccgaattcgagcgaaggagatatacatatgtttttgcaaagacctaaaccttacagcgatgaaagtttagaaagtttctttatccgagtggctaacaaaaatggctacggtgatgtccatcgcttcctagaagccactaaacgattccttcaagacattgaccataatggctatcaaacctttccgactgatataactcggataaacccatactcagctaaaaacagttccagcgcacgaactgcgtcattcctgaaacttgcacaattgacatttaatgaaccgccagagctacttgggttggcaattaacagaacaaacatgaaatactcgccgtcaactagcgcggttgttagaggtgcagaagtctttcctcgcagtttactacggacgcactccatcccctgctgtcctttgtgtctgcgagaaaatggctacgcctcctacctttggcactttcaggggtacgaatactgccacagccataacgtacctttaattaccacttgtagctgtggtaaggagtttgactaccgagtatctgggttaaagggcatttgctgcaaatgcaaggagcctatcaccttaaccagcagggagaacggtcatgaggcagcgtgtactgtttcaaactggcttgctggccatgaatctaaacctctgccaaatcttcctaaaagctaccgatggggtttagttcattggtggatgggtattaaagatagcgagttcgatcacttttcgttcgttcaatttttctcaaactggccaaggtcattccactcgataatcgaagatgaagtagagttcaaccttgagcatgctgttgtcagcacgtctgaattacgactaaaagatcttcttggtcgattgtttttcggttcaattcggttacctgagcggaatcttcaacacaatatcatccttggtgagcttctctgctatttagaaaatcgtttatggcaagacaagggattaatcgccaacctcaaaatgaacgcgttagaggcgactgtaatgttaaattgtagcctcgatcagattgcatcaatggttgaacaacgcatcttgaagccaaatcgaaaaagcaagcccaacagccctcttgatgttaccgattatctatttcatttcggcgatattttctgtctttggttagctgagttccaaagcgatgagtttaaccgttcgttttatgtgtcgaggtggtaaatgcaaactctgaaagaactaatcgcatccaatcctgacgacttaacaactgaacttaagagagcatttcgtccactcacaccgcatattgcaattgatggtaatgaacttgacgcactgacgatattagtcaatttaaccgataagactgatgatcagaaagacctgctcgatcgagccaaatgcaagcaaaaacttcgagatgaaaaatggtgggctagctgcataaattgcgttaattacagacaaagccataacccaaaattcccggatatacgttctgaaggcgtgattcgaacccaagccctgggtgaattaccgagtttcctactctcgtcctcaaaaatcccaccataccattggtcatatagccatgattcaaaatacgtcaacaaaagcgcattcctcaccaatgagttttgttgggatggtgagatctcatgtttgggtgagcttcttaaagatgcagatcacccactttggaatactttgaaaaagttaggttgttctcaaaaaacttgcaaagcaatggcaaaacaactagctgatattactctcacgactatcaatgtcacactcgcaccaaattacctgactcaaatatctctccccgatagtgatacatcctacatttcactctctcctgttgcatcgctatcgatgcaaagccactttcatcagaggctccaagatgaaaatcggcatagcgcgataacgcggtttagccgaactaccaacatgggggtcactgcgatgacatgtggcggcgcatttagaatgttaaagtctggcgctaagttttccagcccccctcatcaccgattaaacagtaaacgaagttggttgacgtcagagcatgttcagtcattaaaacagtaccagcgcctcaacaaaagcctcatacctgaaaactctcggattgcactccgtagaaaatacaaaatcgagcttcaaaatatggtcagatcttggtttgcaatgcaagaccatacccttgattcgaacatacttatccaacatttgaatcatgacctatcttacttaggagccacaaaacgttttgcatacgatccagcgatgaccaagctctttactgagcttttgaaacgagagttatcaaattcaatcaataatggtgagcaacacactaatggatcgtttttagtcctaccgaatatcagggtttgtggcgcaacagctttaagctccccggtaacggtggggattccatcacttacagctttctttggcttcgttcacgcatttgaacggaatataaatcgcaccacctcatcgtttcgtgttgaatcctttgcgatatgcgtccatcaactacatgtcgagaagcgaggtttgacagcagagtttgtggaaaaaggcgacgggactatatccgctcccgcgacccgggatgactggcagtgtgatgtcgtatttagccttattttgaacaccaactttgctcaacatattgaccaagatacgttagttacatcactaccaaagcgattggctcggggttcagcaaaaattgcgattgatgactttaaacatatcaactcattctcgacattagaaacagcgatcgaatctctgccaatagaagctggtaggtggttatcactttacgcacagtcaaacaataatctaagtgatctattagcagccatgacagaggaccatcagctcatggcaagctgcgtcggttaccacttgttagaagagcccaaagataaaccaaactccctcagaggttacaaacacgctatcgccgagtgcatcattggactcattaactcaatcacctttagctcagagactgatcccaacacaatcttttggtcgctaaagaactatcaaaactacctagtggtacagccaaggagtatcaacgatgaaactaccgacaaatctagcctatgagcgctctatcgacccatcagatgtctgtttttttgtcgtctggcccgatgatagaaaaacacctttaacctacaattctcgtactctgctcgggcaaatggaagcggcatcattagcctatgatgtctcaggtcaaccaataaaaagtgccaccgctgaggcgttagctcaagggaaccctcatcaagttgatttctgccacgttccatacggtgcgagtcatattgaatgcagtttctccgtctcgttttcttctgaactacgtcaaccatataagtgtaactcaagcaaagttaaacaaacgctagtgcaattagtcgagctctacgaaacgaaaatcggctggactgagctagcaacccgatatttgatgaacatttgcaacggtaaatggctgtggaaaaatacccgtaaagcctattgctggaacattgtacttacaccttggccttggaacggggaaaaggttggatttgaagatattcgtactaactacacctcacggcaagactttaaaaataataaaaattggtctgctatagttgaaatgatcaaaaccgcattttctagtactgatgggctggcgatatttgaagtcagggccaccttgcacttgccaacgaatgctatggtgcggccaagccaagttttcacagaaaaagaaagtggcagtaaaagtaaatctaaaactcaaaacagtcgagtttttcagagtacaactattgatggtgaacgatcgccaatactaggggcctttaaaacgggagcagctattgcaaccattgacgactggtatcctgaagccactgagccactaagggtcggacggtttggggttcatcgcgaagatgtcacttgctaccgtcatccgtctaccggaaaagattttttctcgatattacaacaagcagagcactatattgaagtgttgagcgccaacaaaactcccgctcaagaaactatcaacgacatgcactttttaatggctaacctgattaagggtgggatgttccagcataaaggagactgactgtgaaatggtattataagacaatcacctttctgccagagttgtgcaacaacgagtcactggctgcaaagtgtctccgcgttctgcatggatttaactatcagtatgagacacgaaatatcggcgtttcatttccgctttggtgtgatgcaacggttggaaaaaagatttcatttgtcagcaagaacaagatagaactcgacttactacttaaacaacactatttcgtccaaatggaacaacttcaatactttcatatatccaacactgttctcgtcccagaagattgtacatacgtttcctttagacgctgtcaatctatagataagctcacagcagcagggctggcaaggaaaatcagacgcctggagaaacgtgctctatctagaggcgagcaatttgacccatcatcttttgctcaaaaagagcatactgcaatagcgcactaccactcacttggggagtccagcaaacagacgaaccgcaactttcgactcaatatcaggatgctctcggagcaaccccgtgaggggaactcgatttttagtagctatggcttatcaaattcagaaaactcgtttcagcctgtacccttaatctgacctttaataaggagatataccatggcgacaagtttacctacgccctcagcaattacgacttcggcgttagagtatgcattccatactcccgctcgcaatctaacgaaatctcgcggaaaaaacattcatcgttatgtcagtgtaaagatgagtaagaggattacggtagaatctactctagagtgtgatgcctgctatcactttgattttgagccaagtattgttcgcttttgcgctcaaccgattcgatttttatattatctcaatggtcagtctcactcctatgttcctgactttctagttcaatttgataccaacgagtttgttctatatgaagtaaagtcagcttatgctaagaacaaacctgattttgatgttgaatgggaggcgaaagtaaaagcagcaactgaactagggctagaattggagcttgttgaagagagtgatattagggatacggttgtattaaataatcttaagcgcatgcatcgttatgcttcgaaagatgagctgaataacgtacataactctctcttaaaaataataaagtacaatggcgcccaatctgcaagatgcttgggagaacagttgggtttaaaaggccgaactgttttaccaattttgtgcgatttgctgtcaaggtgtttactcgatacacgtttggataagcctctatctcttgaatctcgatttgagttggccagttatggctaagaaagggttctcaagtttccatagaaaagcagtctcttcccaagatacgcttgaatcgatagagcttgtctctagcgctaattgtctagaaagtgttacgtatcaagatatatcagcatttcccgaaacaattgcggtagagattaatttccgattaagcattcttcgctttttagcgcgaaagtgcgaaaccattgtggccaaatcaattgaaccacatcgtgtagagctacagcaaaactatagtagaaaaatacccagtgcaataacgatatatcgatggtggcttgcttttcgaaaatcagactacaaccccattagcttagcacctaatatcaaggatagaggtaatagagagacaaaagtgtcaacagttgttgattctattatggaacaggcagttgaaagagttatatctggacgaaaagtcaatgttagctctgcatataaacgtgttcgacgaaaagttcgtcaatacaatctaactcatggaacgaaatacacgtatcctaagtacgaatctgtaagaaagcgagtaaaaaagaaaaccccatttgagttattagccgcagggaaaggggagagagtagctaagagagagtttcgccgaatgggaaaaaagatcctcacgtctagcgtgctagagagggttgaaatagatcacactgtcgttgacctttttgcagtacacgaagagtatcgaatcccattgggccgaccttggcttactcaattggttgattgttacagtaaagctgtaatcggtttttatttaggtttcgagcctcctagctatgtgtcggtttcccttgcacttaagaatgcaatacaacgcaaagatgacttaatctcctcgtatgaatcgatcgagaatgaatggctatgttatggcatcccagacctactcgtaactgataatggtaaagagtttttgtcgaaagcatttgatcaagcatgtgaatcactattgatcaatgtgcatcaaaataaagttgagacgcccgacaacaaacctcatgttgaacgtaactacgggactattaatacttctctgttagacgatttacctgggaaatccttcagccagtaccttcaaagagaagggtacgactctgtgggagaagctacccttacactcaatgagattagagaaatttacttaatttggttggtggatatttatcataaaaaacccaatcagagaggcactaattgtcctaatgttgcgtggaaaaagggttgtcaagaatgggaaccagaggagttctctggttctaaagacgaattagactttaaatttgctattgttgattacaaacaacttactaaagtagggataactgtctacaaagaactgagttatagcaatgaccgtttagctgaatatagagggaagaaaggaaaccataaagttcagttcaagtataaccctgagtgtatggcagttatttgggtgttggatgaggatatgaatgagtactttacagttaatgcgattgactacgaatatgcaagtagagtatcactttggcaacataaatataacatgaaatatcaagcagaactaaattcagcagaatatgatgaggacaaggaaattgatgcagaaataaaaattgaagaaatcgcagatcgttcaattgttaagactaacaaaatcagagctcggaggcgtggcgctaggcatcaagagaatagcgcaagggctaagtcaatcagtaatgcgaacccggcctcgatacaaaaacatgaagatgaaatcgttagtgcagataatgacgattgggatattgattatgtctgagaaatcgtcaaatgagtgaaacgcgtgaggctcgtatatcaagagctaaaagggcatttgtatccacaccgagcgttaggaaaatcttgagttacatggatagatgtagagatctatcagacctagagtctgagcctacatgcatgatggtctatggtgcttcgggtgtaggtaaaacgaccgtcatcaagaaatacttaaatcaaaacagaagagagtccgaagccgggggcgatataataccggttttgcatattgagttgccagacaatgcgaagccagtagatgcagcaagggaattgctggttgaaatgggtgacccgctagcactttatgaaactgacttagctagattgacgaaaagactgactgaattaatccctgcggtcggcgtgaagctgattattatcgatgagttccaacatttggtggaagaaaggtcaaatcgggttcttacccaagtaggtaattggctaaaaatgatacttaacaaaacgaaatgtccaattgttatatttggtatgccatactcaaaagttgtactgcaagcaaactcgcaacttcacgggcgattttccattcaggttgaactgcgcccctttagctaccagggaggtagaggtgtatttaaaacttttttggaataccttgataaagccctaccttttgaaaaacaggctggcttagccaacgaaagtttgcagaaaaaattgtatgcattctctcagggaaacatgcgttcgttgagaaaccttatttatcaagcatctatcgaagcaattgataatcagcatgagacgataaccgaagaagatttcgtttttgcatcgaagttgacatcgggcgataaacccaactcatggaaaaatccttttgaggagggtgttgaggtaacagaagatatgttacgaccgccaccaaaagatattggttgggaggactatttgagacattcaaccccgagagtgagtaaaccaggtagaaataaaaactttttcgaataacctaggctgctgcgctgctgccaccgctgagcaataactagcataaccccttggggcctctaaacgggtcttgaggggttttttgctgaaacctcaggcatgttggaacaaccataaaatgataattacacccataaattgataattatcacacccataaattgatattgcctcttcatggtctaaacttcagtaagtttacgacattttcatgaagaggtcatttccggggatccatggagaaaaaaatcactggatataccaccgttgatatatcccaatggcatcgtaaagaacattttgaggcatttcagtcagttgctcaatgtacctataaccagaccgttcagctggatattacggcctttttaaagaccgtaaagaaaaataagcacaagttttatccggcctttattcacattcttgcccgcctgatgaatgctcatccggagttccgtatggcaatgaaagacggtgagctggtgatatgggatagtgttcacccttgttacaccgttttccatgagcaaactgaaacgttttcatcgctctggagtgaataccacgacgatttccggcagtttctacacatatattcgcaagatgtggcgtgttacggtgaaaacctggcctatttccctaaagggtttattgagaatatgtttttcgtctcagccaatccctgggtgagtttcaccagttttgatttaaacgtggccaatatggacaacttcttcgcccccgttttcactatgggcaaatattatacgcaaggcgacaaggtgctgatgccgctggcgattcaggttcatcatgccgtttgtgatggcttccatgtcggcagaatgcttaatgaattacaacagtactgcgatgagtggcagggcggggcgtaatttttttaaggcagttattggtgcccttctagagtccttactgcagtagttttgctgaaatactcgattcacaaaaatatcaacttatggttgttttgtgagatatcaatatatggttgttttgtggttaagttgctgattataaataattattaaatatcactttatggttgcatcaacaggtaccgagctcgaattcactggccgtcgttttacaacgtcgtgactgggaaaaccctggcgttacccaacttaatcgccttgcggccagtttgctcaggctctccccgtggaggtaataattgacgatatgatcatttattctgcctcccagagcctgataaaaacggtgaatccgttagcgaggtgccgccggcttccattcaggtcgaggtggcccggctccatgcaccgcgacgcaacgcggggaggcagacaaggtatagggcggcgaggcggctacagccgatagtctggaacagcgcacttacgggttgctgcgcaacccaagtgctaccggcgcggcagcgtgacccgtgtcggcggctccaacggctcgccatcgtccagaaaacacggctcatcgggcatcggcaggcgctgctgcccgcgccgttcccattcctccgtttcggtcaaggctggcaggtctggttccatgcccggaatgccgggctggctgggcggctcctcgccggggccggtcggtagttgctgctcgcccggatacagggtcgggatgcggcgcaggtcgccatgccccaacagcgattcgtcctggtcgtcgtgatcaaccaccacggcggcactgaacaccgacaggcgcaactggtcgcggggctggccccacgccacgcggtcattgaccacgtaggccgacacggtgccggggccgttgagcttcacgacggagatccagcgctcggccaccaagtccttgactgcgtattggaccgtccgcaaagaacgtccgatgagcttggaaagtgtcttctggctgaccaccacggcgttctggtggcccatctgcgccacgaggtgatgcagcagcattg

SEQ ID NO: 110 - DNA, 14028 bp, artificial sequence
  Synthetic
ccgccgtgggtttcctcgcaataagcccggcccacgcctcatgcgctttgcgttccgtttgcacccagtgaccgggcttgttcttggcttgaatgccgatttctctggactgcgtggccatgcttatctccatgcggtaggggtgccgcacggttgcggcaccatgcgcaatcagctgcaacttttcggcagcgcgacaacaattatgcgttgcgtaaaagtggcagtcaattacagattttctttaacctacgcaatgagctattgcggggggtgccgcaatgagctgttgcgtaccccccttttttaagttgttgatttttaagtctttcgcatttcgccctatatctagttctttggtgcccaaagaagggcacccctgcggggttcccccacgccttcggcgcggctccccctccggcaaaaagtggcccctccggggcttgttgatcgactgcgcggccttcggccttgcccaaggtggcgctgcccccttggaacccccgcactcgccgccgtgaggctcggggggcaggcgggcgggcttcgcccttcgactgcccccactcgcataggcttgggtcgttccaggcgcgtcaaggccaagccgctgcgcggtcgctgcgcgagccttgacccgccttccacttggtgtccaaccggcaagcgaagcgcgcaggccgcaggccggaggcttttccccagagaaaattaaaaaaattgatggggcaaggccgcaggccgcgcagttggagccggtgggtatgtggtcgaaggctgggtagccggtgggcaatccctgtggtcaagctcgtgggcaggcgcagcctgtccatcagcttgtccagcagggttgtccacgggccgagcgaagcgagccagccggtggccgctcgcggccatcgtccacatatccacgggctggcaagggagcgcagcgaccgcgcagggcgaagcccggagagcaagcccgtagggcgccgcagccgccgtaggcggtcacgactttgcgaagcaaagtctagtgagtatactcaagcattgagtggcccgccggaggcaccgccttgcgctgcccccgtcgagccggttggacaccaaaagggaggggcaggcatggcggcatacgcgatcatgcgatgcaagaagctggcgaaaatgggcaacgtggcggccagtctcaagcacgcctaccgcgagcgcgagacgcccaacgctgacgccagcaggacgccagagaacgagcactgggcggccagcagcaccgatgaagcgatgggccgactgcgcgagttgctgccagagaagcggcgcaaggacgctgtgttggcggtcgagtacgtcatgacggccagcccggaatggtggaagtcggccagccaagaacagcaggcggcgttcttcgagaaggcgcacaagtggctggcggacaagtacggggcggatcgcatcgtgacggccagcatccaccgtgacgaaaccagcccgcacatgaccgcgttcgtggtgccgctgacgcaggacggcaggctgtcggccaaggagttcatcggcaacaaagcgcagatgacccgcgaccagaccacgtttgcggccgctgtggccgatctagggctgcaacggggcatcgagggcagcaaggcacgtcacacgcgcattcaggcgttctacgaggccctggagcggccaccagtgggccacgtcaccatcagcccgcaagcggtcgagccacgcgcctatgcaccgcagggattggccgaaaagctgggaatctcaaagcgcgttgagacgccggaagccgtggccgaccggctgacaaaagcggttcggcaggggtatgagcctgccctacaggccgccgcaggagcgcgtgagatgcgcaagaaggccgatcaagcccaagagacggcccgtgaccttcgggagcgcctgaagcccgttctggacgccctggggccgttgaatcgggatatgcaggccaaggccgccgcgatcatcaaggccgtgggcgaaaagctgctgacggaacagcgggaagtccagcgccagaaacaggcccagcgccagcaggaacgcgggcgcgcacatttccccgaaaagtgccacctgggatgaatgtcagctactgggctatctggacaagggaaaacgcaagcgcaaagagaaagcaggtagcttgcagtgggcttacatggcgatagctagactgggcggttttatggacagcaagcgaaccggaattgccagctggggcgccctctggtaaggttgggaagccctgcaaagtaaactggatggctttcttgccgccaaggatctgatggcgcaggggatcaagatctgatcaagagacaggatgaggatcgtttcgcatgattgaacaagatggattgcacgcaggttctccggccgcttgggtggagaggctattcggctatgactgggcacaacagacaatcggctgctctgatgccgccgtgttccggctgtcagcgcaggggcgcccggttctttttgtcaagaccgacctgtccggtgccctgaatgaactgcaagacgaggcagcgcggctatcgtggctggccacgacgggcgttccttgcgcagctgtgctcgacgttgtcactgaagcgggaagggactggctgctattgggcgaagtgccggggcaggatctcctgtcatctcaccttgctcctgccgagaaagtatccatcatggctgatgcaatgcggcggctgcatacgcttgatccggctacctgcccattcgaccaccaagcgaaacatcgcatcgagcgagcacgtactcggatggaagccggtcttgtcgatcaggatgatctggacgaagagcatcaggggctcgcgccagccgaactgttcgccaggctcaaggcgcgcatgcccgacggcgaggatctcgtcgtgacccatggcgatgcctgcttgccgaatatcatggtggaaaatggccgcttttctggattcatcgactgtggccggctgggtgtggcggaccgctatcaggacatagcgttggctacccgtgatattgctgaagagcttggcggcgaatgggctgaccgcttcctcgtgctttacggtatcgccgctcccgattcgcagcgcatcgccttctatcgccttcttgacgagttcttctgagcgggactctggggttcgaaatgaccgaccaagcgacgcccaacctgccatcacgagatttcgattccaccgccgccttctatgaaaggttgggcttcggaatcgttttccgggacgccggctggatgatcctccagcgcggggatctcatgctggagttcttcgcccacccccatgggcaaatattatacgcaaggcgacaaggtgctgatgccgctggcgattcaggttcatcatgccgtttgtgatggcttccatgtcggcagaatgcttaatgaattacaacagtttttatgcatgcgcccaatacgcaaaccgcctctccccgcgcgttggccgattcattaatgcagctggcacgacaggtttcccgactggtggataaccgtattaccgcctttgagtgagctgataccgctcgccgcagccgaacgaccgagcgcagcgagtcagtgagcgaggacacaagctttgacagctagctcagtcctaggtataatactagcgtcgacgtggagatataccatgggtgaactgccgagtaggtagctgataacagtgcatcctcggccacgaattctgcggccacgtgaactgccgagtaggtagctgataacggatccgaattcgagcgaaggagatatacatatgtttttgcaaagacctaaaccttacagcgatgaaagtttagaaagtttctttatccgagtggctaacaaaaatggctacggtgatgtccatcgcttcctagaagccactaaacgattccttcaagacattgaccataatggctatcaaacctttccgactgatataactcggataaacccatactcagctaaaaacagttccagcgcacgaactgcgtcattcctgaaacttgcacaattgacatttaatgaaccgccagagctacttgggttggcaattaacagaacaaacatgaaatactcgccgtcaactagcgcggttgttagaggtgcagaagtctttcctcgcagtttactacggacgcactccatcccctgctgtcctttgtgtctgcgagaaaatggctacgcctcctacctttggcactttcaggggtacgaatactgccacagccataacgtacctttaattaccacttgtagctgtggtaaggagtttgactaccgagtatctgggttaaagggcatttgctgcaaatgcaaggagcctatcaccttaaccagcagggagaacggtcatgaggcagcgtgtactgtttcaaactggcttgctggccatgaatctaaacctctgccaaatcttcctaaaagctaccgatggggtttagttcattggtggatgggtattaaagatagcgagttcgatcacttttcgttcgttcaatttttctcaaactggccaaggtcattccactcgataatcgaagatgaagtagagttcaaccttgagcatgctgttgtcagcacgtctgaattacgactaaaagatcttcttggtcgattgtttttcggttcaattcggttacctgagcggaatcttcaacacaatatcatccttggtgagcttctctgctatttagaaaatcgtttatggcaagacaagggattaatcgccaacctcaaaatgaacgcgttagaggcgactgtaatgttaaattgtagcctcgatcagattgcatcaatggttgaacaacgcatcttgaagccaaatcgaaaaagcaagcccaacagccctcttgatgttaccgattatctatttcatttcggcgatattttctgtctttggttagctgagttccaaagcgatgagtttaaccgttcgttttatgtgtcgaggtggtaaatgcaaactctgaaagaactaatcgcatccaatcctgacgacttaacaactgaacttaagagagcatttcgtccactcacaccgcatattgcaattgatggtaatgaacttgacgcactgacgatattagtcaatttaaccgataagactgatgatcagaaagacctgctcgatcgagccaaatgcaagcaaaaacttcgagatgaaaaatggtgggctagctgcataaattgcgttaattacagacaaagccataacccaaaattcccggatatacgttctgaaggcgtgattcgaacccaagccctgggtgaattaccgagtttcctactctcgtcctcaaaaatcccaccataccattggtcatatagccatgattcaaaatacgtcaacaaaagcgcattcctcaccaatgagttttgttgggatggtgagatctcatgtttgggtgagcttcttaaagatgcagatcacccactttggaatactttgaaaaagttaggttgttctcaaaaaacttgcaaagcaatggcaaaacaactagctgatattactctcacgactatcaatgtcacactcgcaccaaattacctgactcaaatatctctccccgatagtgatacatcctacatttcactctctcctgttgcatcgctatcgatgcaaagccactttcatcagaggctccaagatgaaaatcggcatagcgcgataacgcggtttagccgaactaccaacatgggggtcactgcgatgacatgtggcggcgcatttagaatgttaaagtctggcgctaagttttccagcccccctcatcaccgattaaacagtaaacgaagttggttgacgtcagagcatgttcagtcattaaaacagtaccagcgcctcaacaaaagcctcatacctgaaaactctcggattgcactccgtagaaaatacaaaatcgagcttcaaaatatggtcagatcttggtttgcaatgcaagaccatacccttgattcgaacatacttatccaacatttgaatcatgacctatcttacttaggagccacaaaacgttttgcatacgatccagcgatgaccaagctctttactgagcttttgaaacgagagttatcaaattcaatcaataatggtgagcaacacactaatggatcgtttttagtcctaccgaatatcagggtttgtggcgcaacagctttaagctccccggtaacggtggggattccatcacttacagctttctttggcttcgttcacgcatttgaacggaatataaatcgcaccacctcatcgtttcgtgttgaatcctttgcgatatgcgtccatcaactacatgtcgagaagcgaggtttgacagcagagtttgtggaaaaaggcgacgggactatatccgctcccgcgacccgggatgactggcagtgtgatgtcgtatttagccttattttgaacaccaactttgctcaacatattgaccaagatacgttagttacatcactaccaaagcgattggctcggggttcagcaaaaattgcgattgatgactttaaacatatcaactcattctcgacattagaaacagcgatcgaatctctgccaatagaagctggtaggtggttatcactttacgcacagtcaaacaataatctaagtgatctattagcagccatgacagaggaccatcagctcatggcaagctgcgtcggttaccacttgttagaagagcccaaagataaaccaaactccctcagaggttacaaacacgctatcgccgagtgcatcattggactcattaactcaatcacctttagctcagagactgatcccaacacaatcttttggtcgctaaagaactatcaaaactacctagtggtacagccaaggagtatcaacgatgaaactaccgacaaatctagcctatgagcgctctatcgacccatcagatgtctgtttttttgtcgtctggcccgatgatagaaaaacacctttaacctacaattctcgtactctgctcgggcaaatggaagcggcatcattagcctatgatgtctcaggtcaaccaataaaaagtgccaccgctgaggcgttagctcaagggaaccctcatcaagttgatttctgccacgttccatacggtgcgagtcatattgaatgcagtttctccgtctcgttttcttctgaactacgtcaaccatataagtgtaactcaagcaaagttaaacaaacgctagtgcaattagtcgagctctacgaaacgaaaatcggctggactgagctagcaacccgatatttgatgaacatttgcaacggtaaatggctgtggaaaaatacccgtaaagcctattgctggaacattgtacttacaccttggccttggaacggggaaaaggttggatttgaagatattcgtactaactacacctcacggcaagactttaaaaataataaaaattggtctgctatagttgaaatgatcaaaaccgcattttctagtactgatgggctggcgatatttgaagtcagggccaccttgcacttgccaacgaatgctatggtgcggccaagccaagttttcacagaaaaagaaagtggcagtaaaagtaaatctaaaactcaaaacagtcgagtttttcagagtacaactattgatggtgaacgatcgccaatactaggggcctttaaaacgggagcagctattgcaaccattgacgactggtatcctgaagccactgagccactaagggtcggacggtttggggttcatcgcgaagatgtcacttgctaccgtcatccgtctaccggaaaagattttttctcgatattacaacaagcagagcactatattgaagtgttgagcgccaacaaaactcccgctcaagaaactatcaacgacatgcactttttaatggctaacctgattaagggtgggatgttccagcataaaggagactgactgtgaaatggtattataagacaatcacctttctgccagagttgtgcaacaacgagtcactggctgcaaagtgtctccgcgttctgcatggatttaactatcagtatgagacacgaaatatcggcgtttcatttccgctttggtgtgatgcaacggttggaaaaaagatttcatttgtcagcaagaacaagatagaactcgacttactacttaaacaacactatttcgtccaaatggaacaacttcaatactttcatatatccaacactgttctcgtcccagaagattgtacatacgtttcctttagacgctgtcaatctatagataagctcacagcagcagggctggcaaggaaaatcagacgcctggagaaacgtgctctatctagaggcgagcaatttgacccatcatcttttgctcaaaaagagcatactgcaatagcgcactaccactcacttggggagtccagcaaacagacgaaccgcaactttcgactcaatatcaggatgctctcggagcaaccccgtgaggggaactcgatttttagtagctatggcttatcaaattcagaaaactcgtttcagcctgtacccttaatctgacctttaataaggagatataccatggcgacaagtttacctacgccctcagcaattacgacttcggcgttagagtatgcattccatactcccgctcgcaatctaacgaaatctcgcggaaaaaacattcatcgttatgtcagtgtaaagatgagtaagaggattacggtagaatctactctagagtgtgatgcctgctatcactttgattttgagccaagtattgttcgcttttgcgctcaaccgattcgatttttatattatctcaatggtcagtctcactcctatgttcctgactttctagttcaatttgataccaacgagtttgttctatatgaagtaaagtcagcttatgctaagaacaaacctgattttgatgttgaatgggaggcgaaagtaaaagcagcaactgaactagggctagaattggagcttgttgaagagagtgatattagggatacggttgtattaaataatcttaagcgcatgcatcgttatgcttcgaaagatgagctgaataacgtacataactctctcttaaaaataataaagtacaatggcgcccaatctgcaagatgcttgggagaacagttgggtttaaaaggccgaactgttttaccaattttgtgcgatttgctgtcaaggtgtttactcgatacacgtttggataagcctctatctcttgaatctcgatttgagttggccagttatggctaagaaagggttctcaagtttccatagaaaagcagtctcttcccaagatacgcttgaatcgatagagcttgtctctagcgctaattgtctagaaagtgttacgtatcaagatatatcagcatttcccgaaacaattgcggtagagattaatttccgattaagcattcttcgctttttagcgcgaaagtgcgaaaccattgtggccaaatcaattgaaccacatcgtgtagagctacagcaaaactatagtagaaaaatacccagtgcaataacgatatatcgatggtggcttgcttttcgaaaatcagactacaaccccattagcttagcacctaatatcaaggatagaggtaatagagagacaaaagtgtcaacagttgttgattctattatggaacaggcagttgaaagagttatatctggacgaaaagtcaatgttagctctgcatataaacgtgttcgacgaaaagttcgtcaatacaatctaactcatggaacgaaatacacgtatcctaagtacgaatctgtaagaaagcgagtaaaaaagaaaaccccatttgagttattagccgcagggaaaggggagagagtagctaagagagagtttcgccgaatgggaaaaaagatcctcacgtctagcgtgctagagagggttgaaatagatcacactgtcgttgacctttttgcagtacacgaagagtatcgaatcccattgggccgaccttggcttactcaattggttgattgttacagtaaagctgtaatcggtttttatttaggtttcgagcctcctagctatgtgtcggtttcccttgcacttaagaatgcaatacaacgcaaagatgacttaatctcctcgtatgaatcgatcgagaatgaatggctatgttatggcatcccagacctactcgtaactgataatggtaaagagtttttgtcgaaagcatttgatcaagcatgtgaatcactattgatcaatgtgcatcaaaataaagttgagacgcccgacaacaaacctcatgttgaacgtaactacgggactattaatacttctctgttagacgatttacctgggaaatccttcagccagtaccttcaaagagaagggtacgactctgtgggagaagctacccttacactcaatgagattagagaaatttacttaatttggttggtggatatttatcataaaaaacccaatcagagaggcactaattgtcctaatgttgcgtggaaaaagggttgtcaagaatgggaaccagaggagttctctggttctaaagacgaattagactttaaatttgctattgttgattacaaacaacttactaaagtagggataactgtctacaaagaactgagttatagcaatgaccgtttagctgaatatagagggaagaaaggaaaccataaagttcagttcaagtataaccctgagtgtatggcagttatttgggtgttggatgaggatatgaatgagtactttacagttaatgcgattgactacgaatatgcaagtagagtatcactttggcaacataaatataacatgaaatatcaagcagaactaaattcagcagaatatgatgaggacaaggaaattgatgcagaaataaaaattgaagaaatcgcagatcgttcaattgttaagactaacaaaatcagagctcggaggcgtggcgctaggcatcaagagaatagcgcaagggctaagtcaatcagtaatgcgaacccggcctcgatacaaaaacatgaagatgaaatcgttagtgcagataatgacgattgggatattgattatgtctgagaaatcgtcaaatgagtgaaacgcgtgaggctcgtatatcaagagctaaaagggcatttgtatccacaccgagcgttaggaaaatcttgagttacatggatagatgtagagatctatcagacctagagtctgagcctacatgcatgatggtctatggtgcttcgggtgtaggtaaaacgaccgtcatcaagaaatacttaaatcaaaacagaagagagtccgaagccgggggcgatataataccggttttgcatattgagttgccagacaatgcgaagccagtagatgcagcaagggaattgctggttgaaatgggtgacccgctagcactttatgaaactgacttagctagattgacgaaaagactgactgaattaatccctgcggtcggcgtgaagctgattattatcgatgagttccaacatttggtggaagaaaggtcaaatcgggttcttacccaagtaggtaattggctaaaaatgatacttaacaaaacgaaatgtccaattgttatatttggtatgccatactcaaaagttgtactgcaagcaaactcgcaacttcacgggcgattttccattcaggttgaactgcgcccctttagctaccagggaggtagaggtgtatttaaaacttttttggaataccttgataaagccctaccttttgaaaaacaggctggcttagccaacgaaagtttgcagaaaaaattgtatgcattctctcagggaaacatgcgttcgttgagaaaccttatttatcaagcatctatcgaagcaattgataatcagcatgagacgataaccgaagaagatttcgtttttgcatcgaagttgacatcgggcgataaacccaactcatggaaaaatccttttgaggagggtgttgaggtaacagaagatatgttacgaccgccaccaaaagatattggttgggaggactatttgagacattcaaccccgagagtgagtaaaccaggtagaaataaaaactttttcgaataacctaggctgctgcgctgctgccaccgctgagcaataactagcataaccccttggggcctctaaacgggtcttgaggggttttttgctgaaacctcaggcatgttggaacaaccataaaatgataattacacccataaattgataattatcacacccataaattgatattgcctcttcatggtctaaacttcagtaagtttacgacattttcatgaagaggtcatttccggggatccatggagaaaaaaatcactggatataccaccgttgatatatcccaatggcatcgtaaagaacattttgaggcatttcagtcagttgctcaatgtacctataaccagaccgttcagctggatattacggcctttttaaagaccgtaaagaaaaataagcacaagttttatccggcctttattcacattcttgcccgcctgatgaatgctcatccggagttccgtatggcaatgaaagacggtgagctggtgatatgggatagtgttcacccttgttacaccgttttccatgagcaaactgaaacgttttcatcgctctggagtgaataccacgacgatttccggcagtttctacacatatattcgcaagatgtggcgtgttacggtgaaaacctggcctatttccctaaagggtttattgagaatatgtttttcgtctcagccaatccctgggtgagtttcaccagttttgatttaaacgtggccaatatggacaacttcttcgcccccgttttcactatgggcaaatattatacgcaaggcgacaaggtgctgatgccgctggcgattcaggttcatcatgccgtttgtgatggcttccatgtcggcagaatgcttaatgaattacaacagtactgcgatgagtggcagggcggggcgtaatttttttaaggcagttattggtgcccttctagagtccttactgcagtagttttgctgaaatactcgattcacaaaaatatcaacttatggttgttttgtgagatatcaatatatggttgttttgtggttaagttgctgattataaataattattaaatatcactttatggttgcatcaacaggtaccgagctcgaattcactggccgtcgttttacaacgtcgtgactgggaaaaccctggcgttacccaacttaatcgccttgcggccagtttgctcaggctctccccgtggaggtaataattgacgatatgatcatttattctgcctcccagagcctgataaaaacggtgaatccgttagcgaggtgccgccggcttccattcaggtcgaggtggcccggctccatgcaccgcgacgcaacgcggggaggcagacaaggtatagggcggcgaggcggctacagccgatagtctggaacagcgcacttacgggttgctgcgcaacccaagtgctaccggcgcggcagcgtgacccgtgtcggcggctccaacggctcgccatcgtccagaaaacacggctcatcgggcatcggcaggcgctgctgcccgcgccgttcccattcctccgtttcggtcaaggctggcaggtctggttccatgcccggaatgccgggctggctgggcggctcctcgccggggccggtcggtagttgctgctcgcccggatacagggtcgggatgcggcgcaggtcgccatgccccaacagcgattcgtcctggtcgtcgtgatcaaccaccacggcggcactgaacaccgacaggcgcaactggtcgcggggctggccccacgccacgcggtcattgaccacgtaggccgacacggtgccggggccgttgagcttcacgacggagatccagcgctcggccaccaagtccttgactgcgtattggaccgtccgcaaagaacgtccgatgagcttggaaagtgtcttctggctgaccaccacggcgttctggtggcccatctgcgccacgaggtgatgcagcagcattg

SEQ ID NO: 111 - DNA, 14035 bp, artificial sequence
  Synthetic
ccgccgtgggtttcctcgcaataagcccggcccacgcctcatgcgctttgcgttccgtttgcacccagtgaccgggcttgttcttggcttgaatgccgatttctctggactgcgtggccatgcttatctccatgcggtaggggtgccgcacggttgcggcaccatgcgcaatcagctgcaacttttcggcagcgcgacaacaattatgcgttgcgtaaaagtggcagtcaattacagattttctttaacctacgcaatgagctattgcggggggtgccgcaatgagctgttgcgtaccccccttttttaagttgttgatttttaagtctttcgcatttcgccctatatctagttctttggtgcccaaagaagggcacccctgcggggttcccccacgccttcggcgcggctccccctccggcaaaaagtggcccctccggggcttgttgatcgactgcgcggccttcggccttgcccaaggtggcgctgcccccttggaacccccgcactcgccgccgtgaggctcggggggcaggcgggcgggcttcgcccttcgactgcccccactcgcataggcttgggtcgttccaggcgcgtcaaggccaagccgctgcgcggtcgctgcgcgagccttgacccgccttccacttggtgtccaaccggcaagcgaagcgcgcaggccgcaggccggaggcttttccccagagaaaattaaaaaaattgatggggcaaggccgcaggccgcgcagttggagccggtgggtatgtggtcgaaggctgggtagccggtgggcaatccctgtggtcaagctcgtgggcaggcgcagcctgtccatcagcttgtccagcagggttgtccacgggccgagcgaagcgagccagccggtggccgctcgcggccatcgtccacatatccacgggctggcaagggagcgcagcgaccgcgcagggcgaagcccggagagcaagcccgtagggcgccgcagccgccgtaggcggtcacgactttgcgaagcaaagtctagtgagtatactcaagcattgagtggcccgccggaggcaccgccttgcgctgcccccgtcgagccggttggacaccaaaagggaggggcaggcatggcggcatacgcgatcatgcgatgcaagaagctggcgaaaatgggcaacgtggcggccagtctcaagcacgcctaccgcgagcgcgagacgcccaacgctgacgccagcaggacgccagagaacgagcactgggcggccagcagcaccgatgaagcgatgggccgactgcgcgagttgctgccagagaagcggcgcaaggacgctgtgttggcggtcgagtacgtcatgacggccagcccggaatggtggaagtcggccagccaagaacagcaggcggcgttcttcgagaaggcgcacaagtggctggcggacaagtacggggcggatcgcatcgtgacggccagcatccaccgtgacgaaaccagcccgcacatgaccgcgttcgtggtgccgctgacgcaggacggcaggctgtcggccaaggagttcatcggcaacaaagcgcagatgacccgcgaccagaccacgtttgcggccgctgtggccgatctagggctgcaacggggcatcgagggcagcaaggcacgtcacacgcgcattcaggcgttctacgaggccctggagcggccaccagtgggccacgtcaccatcagcccgcaagcggtcgagccacgcgcctatgcaccgcagggattggccgaaaagctgggaatctcaaagcgcgttgagacgccggaagccgtggccgaccggctgacaaaagcggttcggcaggggtatgagcctgccctacaggccgccgcaggagcgcgtgagatgcgcaagaaggccgatcaagcccaagagacggcccgtgaccttcgggagcgcctgaagcccgttctggacgccctggggccgttgaatcgggatatgcaggccaaggccgccgcgatcatcaaggccgtgggcgaaaagctgctgacggaacagcgggaagtccagcgccagaaacaggcccagcgccagcaggaacgcgggcgcgcacatttccccgaaaagtgccacctgggatgaatgtcagctactgggctatctggacaagggaaaacgcaagcgcaaagagaaagcaggtagcttgcagtgggcttacatggcgatagctagactgggcggttttatggacagcaagcgaaccggaattgccagctggggcgccctctggtaaggttgggaagccctgcaaagtaaactggatggctttcttgccgccaaggatctgatggcgcaggggatcaagatctgatcaagagacaggatgaggatcgtttcgcatgattgaacaagatggattgcacgcaggttctccggccgcttgggtggagaggctattcggctatgactgggcacaacagacaatcggctgctctgatgccgccgtgttccggctgtcagcgcaggggcgcccggttctttttgtcaagaccgacctgtccggtgccctgaatgaactgcaagacgaggcagcgcggctatcgtggctggccacgacgggcgttccttgcgcagctgtgctcgacgttgtcactgaagcgggaagggactggctgctattgggcgaagtgccggggcaggatctcctgtcatctcaccttgctcctgccgagaaagtatccatcatggctgatgcaatgcggcggctgcatacgcttgatccggctacctgcccattcgaccaccaagcgaaacatcgcatcgagcgagcacgtactcggatggaagccggtcttgtcgatcaggatgatctggacgaagagcatcaggggctcgcgccagccgaactgttcgccaggctcaaggcgcgcatgcccgacggcgaggatctcgtcgtgacccatggcgatgcctgcttgccgaatatcatggtggaaaatggccgcttttctggattcatcgactgtggccggctgggtgtggcggaccgctatcaggacatagcgttggctacccgtgatattgctgaagagcttggcggcgaatgggctgaccgcttcctcgtgctttacggtatcgccgctcccgattcgcagcgcatcgccttctatcgccttcttgacgagttcttctgagcgggactctggggttcgaaatgaccgaccaagcgacgcccaacctgccatcacgagatttcgattccaccgccgccttctatgaaaggttgggcttcggaatcgttttccgggacgccggctggatgatcctccagcgcggggatctcatgctggagttcttcgcccacccccatgggcaaatattatacgcaaggcgacaaggtgctgatgccgctggcgattcaggttcatcatgccgtttgtgatggcttccatgtcggcagaatgcttaatgaattacaacagtttttatgcatgcgcccaatacgcaaaccgcctctccccgcgcgttggccgattcattaatgcagctggcacgacaggtttcccgactggtggataaccgtattaccgcctttgagtgagctgataccgctcgccgcagccgaacgaccgagcgcagcgagtcagtgagcgaggacacaagctttgacagctagctcagtcctaggtataatactagcgtcgacaggatccgaattcgagctcggtataaggagatataccatggcgacaagtttacctacgccctcagcaattacgacttcggcgttagagtatgcattccatactcccgctcgcaatctaacgaaatctcgcggaaaaaacattcatcgttatgtcagtgtaaagatgagtaagaggattacggtagaatctactctagagtgtgatgcctgctatcactttgattttgagccaagtattgttcgcttttgcgctcaaccgattcgatttttatattatctcaatggtcagtctcactcctatgttcctgactttctagttcaatttgataccaacgagtttgttctatatgaagtaaagtcagcttatgctaagaacaaacctgattttgatgttgaatgggaggcgaaagtaaaagcagcaactgaactagggctagaattggagcttgttgaagagagtgatattagggatacggttgtattaaataatcttaagcgcatgcatcgttatgcttcgaaagatgagctgaataacgtacataactctctcttaaaaataataaagtacaatggcgcccaatctgcaagatgcttgggagaacagttgggtttaaaaggccgaactgttttaccaattttgtgcgatttgctgtcaaggtgtttactcgatacacgtttggataagcctctatctcttgaatctcgatttgagttggccagttatggctaagaaagggttctcaagtttccatagaaaagcagtctcttcccaagatacgcttgaatcgatagagcttgtctctagcgctaattgtctagaaagtgttacgtatcaagatatatcagcatttcccgaaacaattgcggtagagattaatttccgattaagcattcttcgctttttagcgcgaaagtgcgaaaccattgtggccaaatcaattgaaccacatcgtgtagagctacagcaaaactatagtagaaaaatacccagtgcaataacgatatatcgatggtggcttgcttttcgaaaatcagactacaaccccattagcttagcacctaatatcaaggatagaggtaatagagagacaaaagtgtcaacagttgttgattctattatggaacaggcagttgaaagagttatatctggacgaaaagtcaatgttagctctgcatataaacgtgttcgacgaaaagttcgtcaatacaatctaactcatggaacgaaatacacgtatcctaagtacgaatctgtaagaaagcgagtaaaaaagaaaaccccatttgagttattagccgcagggaaaggggagagagtagctaagagagagtttcgccgaatgggaaaaaagatcctcacgtctagcgtgctagagagggttgaaatagatcacactgtcgttgacctttttgcagtacacgaagagtatcgaatcccattgggccgaccttggcttactcaattggttgattgttacagtaaagctgtaatcggtttttatttaggtttcgagcctcctagctatgtgtcggtttcccttgcacttaagaatgcaatacaacgcaaagatgacttaatctcctcgtatgaatcgatcgagaatgaatggctatgttatggcatcccagacctactcgtaactgataatggtaaagagtttttgtcgaaagcatttgatcaagcatgtgaatcactattgatcaatgtgcatcaaaataaagttgagacgcccgacaacaaacctcatgttgaacgtaactacgggactattaatacttctctgttagacgatttacctgggaaatccttcagccagtaccttcaaagagaagggtacgactctgtgggagaagctacccttacactcaatgagattagagaaatttacttaatttggttggtggatatttatcataaaaaacccaatcagagaggcactaattgtcctaatgttgcgtggaaaaagggttgtcaagaatgggaaccagaggagttctctggttctaaagacgaattagactttaaatttgctattgttgattacaaacaacttactaaagtagggataactgtctacaaagaactgagttatagcaatgaccgtttagctgaatatagagggaagaaaggaaaccataaagttcagttcaagtataaccctgagtgtatggcagttatttgggtgttggatgaggatatgaatgagtactttacagttaatgcgattgactacgaatatgcaagtagagtatcactttggcaacataaatataacatgaaatatcaagcagaactaaattcagcagaatatgatgaggacaaggaaattgatgcagaaataaaaattgaagaaatcgcagatcgttcaattgttaagactaacaaaatcagagctcggaggcgtggcgctaggcatcaagagaatagcgcaagggctaagtcaatcagtaatgcgaacccggcctcgatacaaaaacatgaagatgaaatcgttagtgcagataatgacgattgggatattgattatgtctgagaaatcgtcaaatgagtgaaacgcgtgaggctcgtatatcaagagctaaaagggcatttgtatccacaccgagcgttaggaaaatcttgagttacatggatagatgtagagatctatcagacctagagtctgagcctacatgcatgatggtctatggtgcttcgggtgtaggtaaaacgaccgtcatcaagaaatacttaaatcaaaacagaagagagtccgaagccgggggcgatataataccggttttgcatattgagttgccagacaatgcgaagccagtagatgcagcaagggaattgctggttgaaatgggtgacccgctagcactttatgaaactgacttagctagattgacgaaaagactgactgaattaatccctgcggtcggcgtgaagctgattattatcgatgagttccaacatttggtggaagaaaggtcaaatcgggttcttacccaagtaggtaattggctaaaaatgatacttaacaaaacgaaatgtccaattgttatatttggtatgccatactcaaaagttgtactgcaagcaaactcgcaacttcacgggcgattttccattcaggttgaactgcgcccctttagctaccagggaggtagaggtgtatttaaaacttttttggaataccttgataaagccctaccttttgaaaaacaggctggcttagccaacgaaagtttgcagaaaaaattgtatgcattctctcagggaaacatgcgttcgttgagaaaccttatttatcaagcatctatcgaagcaattgataatcagcatgagacgataaccgaagaagatttcgtttttgcatcgaagttgacatcgggcgataaacccaactcatggaaaaatccttttgaggagggtgttgaggtaacagaagatatgttacgaccgccaccaaaagatattggttgggaggactatttgagacattcaaccccgagagtgagtaaaccaggtagaaataaaaactttttcgaataacctaggctgctggaaggagatatacatatgtttttgcaaagacctaaaccttacagcgatgaaagtttagaaagtttctttatccgagtggctaacaaaaatggctacggtgatgtccatcgcttcctagaagccactaaacgattccttcaagacattgaccataatggctatcaaacctttccgactgatataactcggataaacccatactcagctaaaaacagttccagcgcacgaactgcgtcattcctgaaacttgcacaattgacatttaatgaaccgccagagctacttgggttggcaattaacagaacaaacatgaaatactcgccgtcaactagcgcggttgttagaggtgcagaagtctttcctcgcagtttactacggacgcactccatcccctgctgtcctttgtgtctgcgagaaaatggctacgcctcctacctttggcactttcaggggtacgaatactgccacagccataacgtacctttaattaccacttgtagctgtggtaaggagtttgactaccgagtatctgggttaaagggcatttgctgcaaatgcaaggagcctatcaccttaaccagcagggagaacggtcatgaggcagcgtgtactgtttcaaactggcttgctggccatgaatctaaacctctgccaaatcttcctaaaagctaccgatggggtttagttcattggtggatgggtattaaagatagcgagttcgatcacttttcgttcgttcaatttttctcaaactggccaaggtcattccactcgataatcgaagatgaagtagagttcaaccttgagcatgctgttgtcagcacgtctgaattacgactaaaagatcttcttggtcgattgtttttcggttcaattcggttacctgagcggaatcttcaacacaatatcatccttggtgagcttctctgctatttagaaaatcgtttatggcaagacaagggattaatcgccaacctcaaaatgaacgcgttagaggcgactgtaatgttaaattgtagcctcgatcagattgcatcaatggttgaacaacgcatcttgaagccaaatcgaaaaagcaagcccaacagccctcttgatgttaccgattatctatttcatttcggcgatattttctgtctttggttagctgagttccaaagcgatgagtttaaccgttcgttttatgtgtcgaggtggtaaatgcaaactctgaaagaactaatcgcatccaatcctgacgacttaacaactgaacttaagagagcatttcgtccactcacaccgcatattgcaattgatggtaatgaacttgacgcactgacgatattagtcaatttaaccgataagactgatgatcagaaagacctgctcgatcgagccaaatgcaagcaaaaacttcgagatgaaaaatggtgggctagctgcataaattgcgttaattacagacaaagccataacccaaaattcccggatatacgttctgaaggcgtgattcgaacccaagccctgggtgaattaccgagtttcctactctcgtcctcaaaaatcccaccataccattggtcatatagccatgattcaaaatacgtcaacaaaagcgcattcctcaccaatgagttttgttgggatggtgagatctcatgtttgggtgagcttcttaaagatgcagatcacccactttggaatactttgaaaaagttaggttgttctcaaaaaacttgcaaagcaatggcaaaacaactagctgatattactctcacgactatcaatgtcacactcgcaccaaattacctgactcaaatatctctccccgatagtgatacatcctacatttcactctctcctgttgcatcgctatcgatgcaaagccactttcatcagaggctccaagatgaaaatcggcatagcgcgataacgcggtttagccgaactaccaacatgggggtcactgcgatgacatgtggcggcgcatttagaatgttaaagtctggcgctaagttttccagcccccctcatcaccgattaaacagtaaacgaagttggttgacgtcagagcatgttcagtcattaaaacagtaccagcgcctcaacaaaagcctcatacctgaaaactctcggattgcactccgtagaaaatacaaaatcgagcttcaaaatatggtcagatcttggtttgcaatgcaagaccatacccttgattcgaacatacttatccaacatttgaatcatgacctatcttacttaggagccacaaaacgttttgcatacgatccagcgatgaccaagctctttactgagcttttgaaacgagagttatcaaattcaatcaataatggtgagcaacacactaatggatcgtttttagtcctaccgaatatcagggtttgtggcgcaacagctttaagctccccggtaacggtggggattccatcacttacagctttctttggcttcgttcacgcatttgaacggaatataaatcgcaccacctcatcgtttcgtgttgaatcctttgcgatatgcgtccatcaactacatgtcgagaagcgaggtttgacagcagagtttgtggaaaaaggcgacgggactatatccgctcccgcgacccgggatgactggcagtgtgatgtcgtatttagccttattttgaacaccaactttgctcaacatattgaccaagatacgttagttacatcactaccaaagcgattggctcggggttcagcaaaaattgcgattgatgactttaaacatatcaactcattctcgacattagaaacagcgatcgaatctctgccaatagaagctggtaggtggttatcactttacgcacagtcaaacaataatctaagtgatctattagcagccatgacagaggaccatcagctcatggcaagctgcgtcggttaccacttgttagaagagcccaaagataaaccaaactccctcagaggttacaaacacgctatcgccgagtgcatcattggactcattaactcaatcacctttagctcagagactgatcccaacacaatcttttggtcgctaaagaactatcaaaactacctagtggtacagccaaggagtatcaacgatgaaactaccgacaaatctagcctatgagcgctctatcgacccatcagatgtctgtttttttgtcgtctggcccgatgatagaaaaacacctttaacctacaattctcgtactctgctcgggcaaatggaagcggcatcattagcctatgatgtctcaggtcaaccaataaaaagtgccaccgctgaggcgttagctcaagggaaccctcatcaagttgatttctgccacgttccatacggtgcgagtcatattgaatgcagtttctccgtctcgttttcttctgaactacgtcaaccatataagtgtaactcaagcaaagttaaacaaacgctagtgcaattagtcgagctctacgaaacgaaaatcggctggactgagctagcaacccgatatttgatgaacatttgcaacggtaaatggctgtggaaaaatacccgtaaagcctattgctggaacattgtacttacaccttggccttggaacggggaaaaggttggatttgaagatattcgtactaactacacctcacggcaagactttaaaaataataaaaattggtctgctatagttgaaatgatcaaaaccgcattttctagtactgatgggctggcgatatttgaagtcagggccaccttgcacttgccaacgaatgctatggtgcggccaagccaagttttcacagaaaaagaaagtggcagtaaaagtaaatctaaaactcaaaacagtcgagtttttcagagtacaactattgatggtgaacgatcgccaatactaggggcctttaaaacgggagcagctattgcaaccattgacgactggtatcctgaagccactgagccactaagggtcggacggtttggggttcatcgcgaagatgtcacttgctaccgtcatccgtctaccggaaaagattttttctcgatattacaacaagcagagcactatattgaagtgttgagcgccaacaaaactcccgctcaagaaactatcaacgacatgcactttttaatggctaacctgattaagggtgggatgttccagcataaaggagactgactgtgaaatggtattataagacaatcacctttctgccagagttgtgcaacaacgagtcactggctgcaaagtgtctccgcgttctgcatggatttaactatcagtatgagacacgaaatatcggcgtttcatttccgctttggtgtgatgcaacggttggaaaaaagatttcatttgtcagcaagaacaagatagaactcgacttactacttaaacaacactatttcgtccaaatggaacaacttcaatactttcatatatccaacactgttctcgtcccagaagattgtacatacgtttcctttagacgctgtcaatctatagataagctcacagcagcagggctggcaaggaaaatcagacgcctggagaaacgtgctctatctagaggcgagcaatttgacccatcatcttttgctcaaaaagagcatactgcaatagcgcactaccactcacttggggagtccagcaaacagacgaaccgcaactttcgactcaatatcaggatgctctcggagcaaccccgtgaggggaactcgatttttagtagctatggcttatcaaattcagaaaactcgtttcagcctgtacccttaatctgacgatataccatgggtgaactgccgagtaggtagctgataacgagacctctgtcttgtcagctagggtggtctcgtgaactgccgagtaggtagctgataacggatccgaattcgctgctgccaccgctgagcaataactagcataaccccttggggcctctaaacgggtcttgaggggttttttgctgaaacctcaggcatgttggaacaaccataaaatgataattacacccataaattgataattatcacacccataaattgatattgcctcttcatggtctaaacttcagtaagtttacgacattttcatgaagaggtcatttccggggatccatggagaaaaaaatcactggatataccaccgttgatatatcccaatggcatcgtaaagaacattttgaggcatttcagtcagttgctcaatgtacctataaccagaccgttcagctggatattacggcctttttaaagaccgtaaagaaaaataagcacaagttttatccggcctttattcacattcttgcccgcctgatgaatgctcatccggagttccgtatggcaatgaaagacggtgagctggtgatatgggatagtgttcacccttgttacaccgttttccatgagcaaactgaaacgttttcatcgctctggagtgaataccacgacgatttccggcagtttctacacatatattcgcaagatgtggcgtgttacggtgaaaacctggcctatttccctaaagggtttattgagaatatgtttttcgtctcagccaatccctgggtgagtttcaccagttttgatttaaacgtggccaatatggacaacttcttcgcccccgttttcactatgggcaaatattatacgcaaggcgacaaggtgctgatgccgctggcgattcaggttcatcatgccgtttgtgatggcttccatgtcggcagaatgcttaatgaattacaacagtactgcgatgagtggcagggcggggcgtaatttttttaaggcagttattggtgcccttctagagtccttactgcagtagttttgctgaaatactcgattcacaaaaatatcaacttatggttgttttgtgagatatcaatatatggttgttttgtggttaagttgctgattataaataattattaaatatcactttatggttgcatcaacaggtaccgagctcgaattcactggccgtcgttttacaacgtcgtgactgggaaaaccctggcgttacccaacttaatcgccttgcggccagtttgctcaggctctccccgtggaggtaataattgacgatatgatcatttattctgcctcccagagcctgataaaaacggtgaatccgttagcgaggtgccgccggcttccattcaggtcgaggtggcccggctccatgcaccgcgacgcaacgcggggaggcagacaaggtatagggcggcgaggcggctacagccgatagtctggaacagcgcacttacgggttgctgcgcaacccaagtgctaccggcgcggcagcgtgacccgtgtcggcggctccaacggctcgccatcgtccagaaaacacggctcatcgggcatcggcaggcgctgctgcccgcgccgttcccattcctccgtttcggtcaaggctggcaggtctggttccatgcccggaatgccgggctggctgggcggctcctcgccggggccggtcggtagttgctgctcgcccggatacagggtcgggatgcggcgcaggtcgccatgccccaacagcgattcgtcctggtcgtcgtgatcaaccaccacggcggcactgaacaccgacaggcgcaactggtcgcggggctggccccacgccacgcggtcattgaccacgtaggccgacacggtgccggggccgttgagcttcacgacggagatccagcgctcggccaccaagtccttgactgcgtattggaccgtccgcaaagaacgtccgatgagcttggaaagtgtcttctggctgaccaccacggcgttctggtggcccatctgcgccacgaggtgatgcagcagcattg

SEQ ID NO: 112 - DNA, 14035 bp, artificial sequence
  Synthetic
ccgccgtgggtttcctcgcaataagcccggcccacgcctcatgcgctttgcgttccgtttgcacccagtgaccgggcttgttcttggcttgaatgccgatttctctggactgcgtggccatgcttatctccatgcggtaggggtgccgcacggttgcggcaccatgcgcaatcagctgcaacttttcggcagcgcgacaacaattatgcgttgcgtaaaagtggcagtcaattacagattttctttaacctacgcaatgagctattgcggggggtgccgcaatgagctgttgcgtaccccccttttttaagttgttgatttttaagtctttcgcatttcgccctatatctagttctttggtgcccaaagaagggcacccctgcggggttcccccacgccttcggcgcggctccccctccggcaaaaagtggcccctccggggcttgttgatcgactgcgcggccttcggccttgcccaaggtggcgctgcccccttggaacccccgcactcgccgccgtgaggctcggggggcaggcgggcgggcttcgcccttcgactgcccccactcgcataggcttgggtcgttccaggcgcgtcaaggccaagccgctgcgcggtcgctgcgcgagccttgacccgccttccacttggtgtccaaccggcaagcgaagcgcgcaggccgcaggccggaggcttttccccagagaaaattaaaaaaattgatggggcaaggccgcaggccgcgcagttggagccggtgggtatgtggtcgaaggctgggtagccggtgggcaatccctgtggtcaagctcgtgggcaggcgcagcctgtccatcagcttgtccagcagggttgtccacgggccgagcgaagcgagccagccggtggccgctcgcggccatcgtccacatatccacgggctggcaagggagcgcagcgaccgcgcagggcgaagcccggagagcaagcccgtagggcgccgcagccgccgtaggcggtcacgactttgcgaagcaaagtctagtgagtatactcaagcattgagtggcccgccggaggcaccgccttgcgctgcccccgtcgagccggttggacaccaaaagggaggggcaggcatggcggcatacgcgatcatgcgatgcaagaagctggcgaaaatgggcaacgtggcggccagtctcaagcacgcctaccgcgagcgcgagacgcccaacgctgacgccagcaggacgccagagaacgagcactgggcggccagcagcaccgatgaagcgatgggccgactgcgcgagttgctgccagagaagcggcgcaaggacgctgtgttggcggtcgagtacgtcatgacggccagcccggaatggtggaagtcggccagccaagaacagcaggcggcgttcttcgagaaggcgcacaagtggctggcggacaagtacggggcggatcgcatcgtgacggccagcatccaccgtgacgaaaccagcccgcacatgaccgcgttcgtggtgccgctgacgcaggacggcaggctgtcggccaaggagttcatcggcaacaaagcgcagatgacccgcgaccagaccacgtttgcggccgctgtggccgatctagggctgcaacggggcatcgagggcagcaaggcacgtcacacgcgcattcaggcgttctacgaggccctggagcggccaccagtgggccacgtcaccatcagcccgcaagcggtcgagccacgcgcctatgcaccgcagggattggccgaaaagctgggaatctcaaagcgcgttgagacgccggaagccgtggccgaccggctgacaaaagcggttcggcaggggtatgagcctgccctacaggccgccgcaggagcgcgtgagatgcgcaagaaggccgatcaagcccaagagacggcccgtgaccttcgggagcgcctgaagcccgttctggacgccctggggccgttgaatcgggatatgcaggccaaggccgccgcgatcatcaaggccgtgggcgaaaagctgctgacggaacagcgggaagtccagcgccagaaacaggcccagcgccagcaggaacgcgggcgcgcacatttccccgaaaagtgccacctgggatgaatgtcagctactgggctatctggacaagggaaaacgcaagcgcaaagagaaagcaggtagcttgcagtgggcttacatggcgatagctagactgggcggttttatggacagcaagcgaaccggaattgccagctggggcgccctctggtaaggttgggaagccctgcaaagtaaactggatggctttcttgccgccaaggatctgatggcgcaggggatcaagatctgatcaagagacaggatgaggatcgtttcgcatgattgaacaagatggattgcacgcaggttctccggccgcttgggtggagaggctattcggctatgactgggcacaacagacaatcggctgctctgatgccgccgtgttccggctgtcagcgcaggggcgcccggttctttttgtcaagaccgacctgtccggtgccctgaatgaactgcaagacgaggcagcgcggctatcgtggctggccacgacgggcgttccttgcgcagctgtgctcgacgttgtcactgaagcgggaagggactggctgctattgggcgaagtgccggggcaggatctcctgtcatctcaccttgctcctgccgagaaagtatccatcatggctgatgcaatgcggcggctgcatacgcttgatccggctacctgcccattcgaccaccaagcgaaacatcgcatcgagcgagcacgtactcggatggaagccggtcttgtcgatcaggatgatctggacgaagagcatcaggggctcgcgccagccgaactgttcgccaggctcaaggcgcgcatgcccgacggcgaggatctcgtcgtgacccatggcgatgcctgcttgccgaatatcatggtggaaaatggccgcttttctggattcatcgactgtggccggctgggtgtggcggaccgctatcaggacatagcgttggctacccgtgatattgctgaagagcttggcggcgaatgggctgaccgcttcctcgtgctttacggtatcgccgctcccgattcgcagcgcatcgccttctatcgccttcttgacgagttcttctgagcgggactctggggttcgaaatgaccgaccaagcgacgcccaacctgccatcacgagatttcgattccaccgccgccttctatgaaaggttgggcttcggaatcgttttccgggacgccggctggatgatcctccagcgcggggatctcatgctggagttcttcgcccacccccatgggcaaatattatacgcaaggcgacaaggtgctgatgccgctggcgattcaggttcatcatgccgtttgtgatggcttccatgtcggcagaatgcttaatgaattacaacagtttttatgcatgcgcccaatacgcaaaccgcctctccccgcgcgttggccgattcattaatgcagctggcacgacaggtttcccgactggtggataaccgtattaccgcctttgagtgagctgataccgctcgccgcagccgaacgaccgagcgcagcgagtcagtgagcgaggacacaagctttgacagctagctcagtcctaggtataatactagcgtcgacaggatccgaattcgagctcggtataaggagatataccatggcgacaagtttacctacgccctcagcaattacgacttcggcgttagagtatgcattccatactcccgctcgcaatctaacgaaatctcgcggaaaaaacattcatcgttatgtcagtgtaaagatgagtaagaggattacggtagaatctactctagagtgtgatgcctgctatcactttgattttgagccaagtattgttcgcttttgcgctcaaccgattcgatttttatattatctcaatggtcagtctcactcctatgttcctgactttctagttcaatttgataccaacgagtttgttctatatgaagtaaagtcagcttatgctaagaacaaacctgattttgatgttgaatgggaggcgaaagtaaaagcagcaactgaactagggctagaattggagcttgttgaagagagtgatattagggatacggttgtattaaataatcttaagcgcatgcatcgttatgcttcgaaagatgagctgaataacgtacataactctctcttaaaaataataaagtacaatggcgcccaatctgcaagatgcttgggagaacagttgggtttaaaaggccgaactgttttaccaattttgtgcgatttgctgtcaaggtgtttactcgatacacgtttggataagcctctatctcttgaatctcgatttgagttggccagttatggctaagaaagggttctcaagtttccatagaaaagcagtctcttcccaagatacgcttgaatcgatagagcttgtctctagcgctaattgtctagaaagtgttacgtatcaagatatatcagcatttcccgaaacaattgcggtagagattaatttccgattaagcattcttcgctttttagcgcgaaagtgcgaaaccattgtggccaaatcaattgaaccacatcgtgtagagctacagcaaaactatagtagaaaaatacccagtgcaataacgatatatcgatggtggcttgcttttcgaaaatcagactacaaccccattagcttagcacctaatatcaaggatagaggtaatagagagacaaaagtgtcaacagttgttgattctattatggaacaggcagttgaaagagttatatctggacgaaaagtcaatgttagctctgcatataaacgtgttcgacgaaaagttcgtcaatacaatctaactcatggaacgaaatacacgtatcctaagtacgaatctgtaagaaagcgagtaaaaaagaaaaccccatttgagttattagccgcagggaaaggggagagagtagctaagagagagtttcgccgaatgggaaaaaagatcctcacgtctagcgtgctagagagggttgaaatagatcacactgtcgttgacctttttgcagtacacgaagagtatcgaatcccattgggccgaccttggcttactcaattggttgattgttacagtaaagctgtaatcggtttttatttaggtttcgagcctcctagctatgtgtcggtttcccttgcacttaagaatgcaatacaacgcaaagatgacttaatctcctcgtatgaatcgatcgagaatgaatggctatgttatggcatcccagacctactcgtaactgataatggtaaagagtttttgtcgaaagcatttgatcaagcatgtgaatcactattgatcaatgtgcatcaaaataaagttgagacgcccgacaacaaacctcatgttgaacgtaactacgggactattaatacttctctgttagacgatttacctgggaaatccttcagccagtaccttcaaagagaagggtacgactctgtgggagaagctacccttacactcaatgagattagagaaatttacttaatttggttggtggatatttatcataaaaaacccaatcagagaggcactaattgtcctaatgttgcgtggaaaaagggttgtcaagaatgggaaccagaggagttctctggttctaaagacgaattagactttaaatttgctattgttgattacaaacaacttactaaagtagggataactgtctacaaagaactgagttatagcaatgaccgtttagctgaatatagagggaagaaaggaaaccataaagttcagttcaagtataaccctgagtgtatggcagttatttgggtgttggatgaggatatgaatgagtactttacagttaatgcgattgactacgaatatgcaagtagagtatcactttggcaacataaatataacatgaaatatcaagcagaactaaattcagcagaatatgatgaggacaaggaaattgatgcagaaataaaaattgaagaaatcgcagatcgttcaattgttaagactaacaaaatcagagctcggaggcgtggcgctaggcatcaagagaatagcgcaagggctaagtcaatcagtaatgcgaacccggcctcgatacaaaaacatgaagatgaaatcgttagtgcagataatgacgattgggatattgattatgtctgagaaatcgtcaaatgagtgaaacgcgtgaggctcgtatatcaagagctaaaagggcatttgtatccacaccgagcgttaggaaaatcttgagttacatggatagatgtagagatctatcagacctagagtctgagcctacatgcatgatggtctatggtgcttcgggtgtaggtaaaacgaccgtcatcaagaaatacttaaatcaaaacagaagagagtccgaagccgggggcgatataataccggttttgcatattgagttgccagacaatgcgaagccagtagatgcagcaagggaattgctggttgaaatgggtgacccgctagcactttatgaaactgacttagctagattgacgaaaagactgactgaattaatccctgcggtcggcgtgaagctgattattatcgatgagttccaacatttggtggaagaaaggtcaaatcgggttcttacccaagtaggtaattggctaaaaatgatacttaacaaaacgaaatgtccaattgttatatttggtatgccatactcaaaagttgtactgcaagcaaactcgcaacttcacgggcgattttccattcaggttgaactgcgcccctttagctaccagggaggtagaggtgtatttaaaacttttttggaataccttgataaagccctaccttttgaaaaacaggctggcttagccaacgaaagtttgcagaaaaaattgtatgcattctctcagggaaacatgcgttcgttgagaaaccttatttatcaagcatctatcgaagcaattgataatcagcatgagacgataaccgaagaagatttcgtttttgcatcgaagttgacatcgggcgataaacccaactcatggaaaaatccttttgaggagggtgttgaggtaacagaagatatgttacgaccgccaccaaaagatattggttgggaggactatttgagacattcaaccccgagagtgagtaaaccaggtagaaataaaaactttttcgaataacctaggctgctggaaggagatatacatatgtttttgcaaagacctaaaccttacagcgatgaaagtttagaaagtttctttatccgagtggctaacaaaaatggctacggtgatgtccatcgcttcctagaagccactaaacgattccttcaagacattgaccataatggctatcaaacctttccgactgatataactcggataaacccatactcagctaaaaacagttccagcgcacgaactgcgtcattcctgaaacttgcacaattgacatttaatgaaccgccagagctacttgggttggcaattaacagaacaaacatgaaatactcgccgtcaactagcgcggttgttagaggtgcagaagtctttcctcgcagtttactacggacgcactccatcccctgctgtcctttgtgtctgcgagaaaatggctacgcctcctacctttggcactttcaggggtacgaatactgccacagccataacgtacctttaattaccacttgtagctgtggtaaggagtttgactaccgagtatctgggttaaagggcatttgctgcaaatgcaaggagcctatcaccttaaccagcagggagaacggtcatgaggcagcgtgtactgtttcaaactggcttgctggccatgaatctaaacctctgccaaatcttcctaaaagctaccgatggggtttagttcattggtggatgggtattaaagatagcgagttcgatcacttttcgttcgttcaatttttctcaaactggccaaggtcattccactcgataatcgaagatgaagtagagttcaaccttgagcatgctgttgtcagcacgtctgaattacgactaaaagatcttcttggtcgattgtttttcggttcaattcggttacctgagcggaatcttcaacacaatatcatccttggtgagcttctctgctatttagaaaatcgtttatggcaagacaagggattaatcgccaacctcaaaatgaacgcgttagaggcgactgtaatgttaaattgtagcctcgatcagattgcatcaatggttgaacaacgcatcttgaagccaaatcgaaaaagcaagcccaacagccctcttgatgttaccgattatctatttcatttcggcgatattttctgtctttggttagctgagttccaaagcgatgagtttaaccgttcgttttatgtgtcgaggtggtaaatgcaaactctgaaagaactaatcgcatccaatcctgacgacttaacaactgaacttaagagagcatttcgtccactcacaccgcatattgcaattgatggtaatgaacttgacgcactgacgatattagtcaatttaaccgataagactgatgatcagaaagacctgctcgatcgagccaaatgcaagcaaaaacttcgagatgaaaaatggtgggctagctgcataaattgcgttaattacagacaaagccataacccaaaattcccggatatacgttctgaaggcgtgattcgaacccaagccctgggtgaattaccgagtttcctactctcgtcctcaaaaatcccaccataccattggtcatatagccatgattcaaaatacgtcaacaaaagcgcattcctcaccaatgagttttgttgggatggtgagatctcatgtttgggtgagcttcttaaagatgcagatcacccactttggaatactttgaaaaagttaggttgttctcaaaaaacttgcaaagcaatggcaaaacaactagctgatattactctcacgactatcaatgtcacactcgcaccaaattacctgactcaaatatctctccccgatagtgatacatcctacatttcactctctcctgttgcatcgctatcgatgcaaagccactttcatcagaggctccaagatgaaaatcggcatagcgcgataacgcggtttagccgaactaccaacatgggggtcactgcgatgacatgtggcggcgcatttagaatgttaaagtctggcgctaagttttccagcccccctcatcaccgattaaacagtaaacgaagttggttgacgtcagagcatgttcagtcattaaaacagtaccagcgcctcaacaaaagcctcatacctgaaaactctcggattgcactccgtagaaaatacaaaatcgagcttcaaaatatggtcagatcttggtttgcaatgcaagaccatacccttgattcgaacatacttatccaacatttgaatcatgacctatcttacttaggagccacaaaacgttttgcatacgatccagcgatgaccaagctctttactgagcttttgaaacgagagttatcaaattcaatcaataatggtgagcaacacactaatggatcgtttttagtcctaccgaatatcagggtttgtggcgcaacagctttaagctccccggtaacggtggggattccatcacttacagctttctttggcttcgttcacgcatttgaacggaatataaatcgcaccacctcatcgtttcgtgttgaatcctttgcgatatgcgtccatcaactacatgtcgagaagcgaggtttgacagcagagtttgtggaaaaaggcgacgggactatatccgctcccgcgacccgggatgactggcagtgtgatgtcgtatttagccttattttgaacaccaactttgctcaacatattgaccaagatacgttagttacatcactaccaaagcgattggctcggggttcagcaaaaattgcgattgatgactttaaacatatcaactcattctcgacattagaaacagcgatcgaatctctgccaatagaagctggtaggtggttatcactttacgcacagtcaaacaataatctaagtgatctattagcagccatgacagaggaccatcagctcatggcaagctgcgtcggttaccacttgttagaagagcccaaagataaaccaaactccctcagaggttacaaacacgctatcgccgagtgcatcattggactcattaactcaatcacctttagctcagagactgatcccaacacaatcttttggtcgctaaagaactatcaaaactacctagtggtacagccaaggagtatcaacgatgaaactaccgacaaatctagcctatgagcgctctatcgacccatcagatgtctgtttttttgtcgtctggcccgatgatagaaaaacacctttaacctacaattctcgtactctgctcgggcaaatggaagcggcatcattagcctatgatgtctcaggtcaaccaataaaaagtgccaccgctgaggcgttagctcaagggaaccctcatcaagttgatttctgccacgttccatacggtgcgagtcatattgaatgcagtttctccgtctcgttttcttctgaactacgtcaaccatataagtgtaactcaagcaaagttaaacaaacgctagtgcaattagtcgagctctacgaaacgaaaatcggctggactgagctagcaacccgatatttgatgaacatttgcaacggtaaatggctgtggaaaaatacccgtaaagcctattgctggaacattgtacttacaccttggccttggaacggggaaaaggttggatttgaagatattcgtactaactacacctcacggcaagactttaaaaataataaaaattggtctgctatagttgaaatgatcaaaaccgcattttctagtactgatgggctggcgatatttgaagtcagggccaccttgcacttgccaacgaatgctatggtgcggccaagccaagttttcacagaaaaagaaagtggcagtaaaagtaaatctaaaactcaaaacagtcgagtttttcagagtacaactattgatggtgaacgatcgccaatactaggggcctttaaaacgggagcagctattgcaaccattgacgactggtatcctgaagccactgagccactaagggtcggacggtttggggttcatcgcgaagatgtcacttgctaccgtcatccgtctaccggaaaagattttttctcgatattacaacaagcagagcactatattgaagtgttgagcgccaacaaaactcccgctcaagaaactatcaacgacatgcactttttaatggctaacctgattaagggtgggatgttccagcataaaggagactgactgtgaaatggtattataagacaatcacctttctgccagagttgtgcaacaacgagtcactggctgcaaagtgtctccgcgttctgcatggatttaactatcagtatgagacacgaaatatcggcgtttcatttccgctttggtgtgatgcaacggttggaaaaaagatttcatttgtcagcaagaacaagatagaactcgacttactacttaaacaacactatttcgtccaaatggaacaacttcaatactttcatatatccaacactgttctcgtcccagaagattgtacatacgtttcctttagacgctgtcaatctatagataagctcacagcagcagggctggcaaggaaaatcagacgcctggagaaacgtgctctatctagaggcgagcaatttgacccatcatcttttgctcaaaaagagcatactgcaatagcgcactaccactcacttggggagtccagcaaacagacgaaccgcaactttcgactcaatatcaggatgctctcggagcaaccccgtgaggggaactcgatttttagtagctatggcttatcaaattcagaaaactcgtttcagcctgtacccttaatctgacgatataccatgggtgaactgccgagtaggtagctgataacttcgaaggctgcgcgcatttcttcctggctgcgtgaactgccgagtaggtagctgataacggatccgaattcgctgctgccaccgctgagcaataactagcataaccccttggggcctctaaacgggtcttgaggggttttttgctgaaacctcaggcatgttggaacaaccataaaatgataattacacccataaattgataattatcacacccataaattgatattgcctcttcatggtctaaacttcagtaagtttacgacattttcatgaagaggtcatttccggggatccatggagaaaaaaatcactggatataccaccgttgatatatcccaatggcatcgtaaagaacattttgaggcatttcagtcagttgctcaatgtacctataaccagaccgttcagctggatattacggcctttttaaagaccgtaaagaaaaataagcacaagttttatccggcctttattcacattcttgcccgcctgatgaatgctcatccggagttccgtatggcaatgaaagacggtgagctggtgatatgggatagtgttcacccttgttacaccgttttccatgagcaaactgaaacgttttcatcgctctggagtgaataccacgacgatttccggcagtttctacacatatattcgcaagatgtggcgtgttacggtgaaaacctggcctatttccctaaagggtttattgagaatatgtttttcgtctcagccaatccctgggtgagtttcaccagttttgatttaaacgtggccaatatggacaacttcttcgcccccgttttcactatgggcaaatattatacgcaaggcgacaaggtgctgatgccgctggcgattcaggttcatcatgccgtttgtgatggcttccatgtcggcagaatgcttaatgaattacaacagtactgcgatgagtggcagggcggggcgtaatttttttaaggcagttattggtgcccttctagagtccttactgcagtagttttgctgaaatactcgattcacaaaaatatcaacttatggttgttttgtgagatatcaatatatggttgttttgtggttaagttgctgattataaataattattaaatatcactttatggttgcatcaacaggtaccgagctcgaattcactggccgtcgttttacaacgtcgtgactgggaaaaccctggcgttacccaacttaatcgccttgcggccagtttgctcaggctctccccgtggaggtaataattgacgatatgatcatttattctgcctcccagagcctgataaaaacggtgaatccgttagcgaggtgccgccggcttccattcaggtcgaggtggcccggctccatgcaccgcgacgcaacgcggggaggcagacaaggtatagggcggcgaggcggctacagccgatagtctggaacagcgcacttacgggttgctgcgcaacccaagtgctaccggcgcggcagcgtgacccgtgtcggcggctccaacggctcgccatcgtccagaaaacacggctcatcgggcatcggcaggcgctgctgcccgcgccgttcccattcctccgtttcggtcaaggctggcaggtctggttccatgcccggaatgccgggctggctgggcggctcctcgccggggccggtcggtagttgctgctcgcccggatacagggtcgggatgcggcgcaggtcgccatgccccaacagcgattcgtcctggtcgtcgtgatcaaccaccacggcggcactgaacaccgacaggcgcaactggtcgcggggctggccccacgccacgcggtcattgaccacgtaggccgacacggtgccggggccgttgagcttcacgacggagatccagcgctcggccaccaagtccttgactgcgtattggaccgtccgcaaagaacgtccgatgagcttggaaagtgtcttctggctgaccaccacggcgttctggtggcccatctgcgccacgaggtgatgcagcagcattg

SEQ ID NO: 113 - DNA, 14035 bp, artificial sequence
  Synthetic
ccgccgtgggtttcctcgcaataagcccggcccacgcctcatgcgctttgcgttccgtttgcacccagtgaccgggcttgttcttggcttgaatgccgatttctctggactgcgtggccatgcttatctccatgcggtaggggtgccgcacggttgcggcaccatgcgcaatcagctgcaacttttcggcagcgcgacaacaattatgcgttgcgtaaaagtggcagtcaattacagattttctttaacctacgcaatgagctattgcggggggtgccgcaatgagctgttgcgtaccccccttttttaagttgttgatttttaagtctttcgcatttcgccctatatctagttctttggtgcccaaagaagggcacccctgcggggttcccccacgccttcggcgcggctccccctccggcaaaaagtggcccctccggggcttgttgatcgactgcgcggccttcggccttgcccaaggtggcgctgcccccttggaacccccgcactcgccgccgtgaggctcggggggcaggcgggcgggcttcgcccttcgactgcccccactcgcataggcttgggtcgttccaggcgcgtcaaggccaagccgctgcgcggtcgctgcgcgagccttgacccgccttccacttggtgtccaaccggcaagcgaagcgcgcaggccgcaggccggaggcttttccccagagaaaattaaaaaaattgatggggcaaggccgcaggccgcgcagttggagccggtgggtatgtggtcgaaggctgggtagccggtgggcaatccctgtggtcaagctcgtgggcaggcgcagcctgtccatcagcttgtccagcagggttgtccacgggccgagcgaagcgagccagccggtggccgctcgcggccatcgtccacatatccacgggctggcaagggagcgcagcgaccgcgcagggcgaagcccggagagcaagcccgtagggcgccgcagccgccgtaggcggtcacgactttgcgaagcaaagtctagtgagtatactcaagcattgagtggcccgccggaggcaccgccttgcgctgcccccgtcgagccggttggacaccaaaagggaggggcaggcatggcggcatacgcgatcatgcgatgcaagaagctggcgaaaatgggcaacgtggcggccagtctcaagcacgcctaccgcgagcgcgagacgcccaacgctgacgccagcaggacgccagagaacgagcactgggcggccagcagcaccgatgaagcgatgggccgactgcgcgagttgctgccagagaagcggcgcaaggacgctgtgttggcggtcgagtacgtcatgacggccagcccggaatggtggaagtcggccagccaagaacagcaggcggcgttcttcgagaaggcgcacaagtggctggcggacaagtacggggcggatcgcatcgtgacggccagcatccaccgtgacgaaaccagcccgcacatgaccgcgttcgtggtgccgctgacgcaggacggcaggctgtcggccaaggagttcatcggcaacaaagcgcagatgacccgcgaccagaccacgtttgcggccgctgtggccgatctagggctgcaacggggcatcgagggcagcaaggcacgtcacacgcgcattcaggcgttctacgaggccctggagcggccaccagtgggccacgtcaccatcagcccgcaagcggtcgagccacgcgcctatgcaccgcagggattggccgaaaagctgggaatctcaaagcgcgttgagacgccggaagccgtggccgaccggctgacaaaagcggttcggcaggggtatgagcctgccctacaggccgccgcaggagcgcgtgagatgcgcaagaaggccgatcaagcccaagagacggcccgtgaccttcgggagcgcctgaagcccgttctggacgccctggggccgttgaatcgggatatgcaggccaaggccgccgcgatcatcaaggccgtgggcgaaaagctgctgacggaacagcgggaagtccagcgccagaaacaggcccagcgccagcaggaacgcgggcgcgcacatttccccgaaaagtgccacctgggatgaatgtcagctactgggctatctggacaagggaaaacgcaagcgcaaagagaaagcaggtagcttgcagtgggcttacatggcgatagctagactgggcggttttatggacagcaagcgaaccggaattgccagctggggcgccctctggtaaggttgggaagccctgcaaagtaaactggatggctttcttgccgccaaggatctgatggcgcaggggatcaagatctgatcaagagacaggatgaggatcgtttcgcatgattgaacaagatggattgcacgcaggttctccggccgcttgggtggagaggctattcggctatgactgggcacaacagacaatcggctgctctgatgccgccgtgttccggctgtcagcgcaggggcgcccggttctttttgtcaagaccgacctgtccggtgccctgaatgaactgcaagacgaggcagcgcggctatcgtggctggccacgacgggcgttccttgcgcagctgtgctcgacgttgtcactgaagcgggaagggactggctgctattgggcgaagtgccggggcaggatctcctgtcatctcaccttgctcctgccgagaaagtatccatcatggctgatgcaatgcggcggctgcatacgcttgatccggctacctgcccattcgaccaccaagcgaaacatcgcatcgagcgagcacgtactcggatggaagccggtcttgtcgatcaggatgatctggacgaagagcatcaggggctcgcgccagccgaactgttcgccaggctcaaggcgcgcatgcccgacggcgaggatctcgtcgtgacccatggcgatgcctgcttgccgaatatcatggtggaaaatggccgcttttctggattcatcgactgtggccggctgggtgtggcggaccgctatcaggacatagcgttggctacccgtgatattgctgaagagcttggcggcgaatgggctgaccgcttcctcgtgctttacggtatcgccgctcccgattcgcagcgcatcgccttctatcgccttcttgacgagttcttctgagcgggactctggggttcgaaatgaccgaccaagcgacgcccaacctgccatcacgagatttcgattccaccgccgccttctatgaaaggttgggcttcggaatcgttttccgggacgccggctggatgatcctccagcgcggggatctcatgctggagttcttcgcccacccccatgggcaaatattatacgcaaggcgacaaggtgctgatgccgctggcgattcaggttcatcatgccgtttgtgatggcttccatgtcggcagaatgcttaatgaattacaacagtttttatgcatgcgcccaatacgcaaaccgcctctccccgcgcgttggccgattcattaatgcagctggcacgacaggtttcccgactggtggataaccgtattaccgcctttgagtgagctgataccgctcgccgcagccgaacgaccgagcgcagcgagtcagtgagcgaggacacaagctttgacagctagctcagtcctaggtataatactagcgtcgacaggatccgaattcgagctcggtataaggagatataccatggcgacaagtttacctacgccctcagcaattacgacttcggcgttagagtatgcattccatactcccgctcgcaatctaacgaaatctcgcggaaaaaacattcatcgttatgtcagtgtaaagatgagtaagaggattacggtagaatctactctagagtgtgatgcctgctatcactttgattttgagccaagtattgttcgcttttgcgctcaaccgattcgatttttatattatctcaatggtcagtctcactcctatgttcctgactttctagttcaatttgataccaacgagtttgttctatatgaagtaaagtcagcttatgctaagaacaaacctgattttgatgttgaatgggaggcgaaagtaaaagcagcaactgaactagggctagaattggagcttgttgaagagagtgatattagggatacggttgtattaaataatcttaagcgcatgcatcgttatgcttcgaaagatgagctgaataacgtacataactctctcttaaaaataataaagtacaatggcgcccaatctgcaagatgcttgggagaacagttgggtttaaaaggccgaactgttttaccaattttgtgcgatttgctgtcaaggtgtttactcgatacacgtttggataagcctctatctcttgaatctcgatttgagttggccagttatggctaagaaagggttctcaagtttccatagaaaagcagtctcttcccaagatacgcttgaatcgatagagcttgtctctagcgctaattgtctagaaagtgttacgtatcaagatatatcagcatttcccgaaacaattgcggtagagattaatttccgattaagcattcttcgctttttagcgcgaaagtgcgaaaccattgtggccaaatcaattgaaccacatcgtgtagagctacagcaaaactatagtagaaaaatacccagtgcaataacgatatatcgatggtggcttgcttttcgaaaatcagactacaaccccattagcttagcacctaatatcaaggatagaggtaatagagagacaaaagtgtcaacagttgttgattctattatggaacaggcagttgaaagagttatatctggacgaaaagtcaatgttagctctgcatataaacgtgttcgacgaaaagttcgtcaatacaatctaactcatggaacgaaatacacgtatcctaagtacgaatctgtaagaaagcgagtaaaaaagaaaaccccatttgagttattagccgcagggaaaggggagagagtagctaagagagagtttcgccgaatgggaaaaaagatcctcacgtctagcgtgctagagagggttgaaatagatcacactgtcgttgacctttttgcagtacacgaagagtatcgaatcccattgggccgaccttggcttactcaattggttgattgttacagtaaagctgtaatcggtttttatttaggtttcgagcctcctagctatgtgtcggtttcccttgcacttaagaatgcaatacaacgcaaagatgacttaatctcctcgtatgaatcgatcgagaatgaatggctatgttatggcatcccagacctactcgtaactgataatggtaaagagtttttgtcgaaagcatttgatcaagcatgtgaatcactattgatcaatgtgcatcaaaataaagttgagacgcccgacaacaaacctcatgttgaacgtaactacgggactattaatacttctctgttagacgatttacctgggaaatccttcagccagtaccttcaaagagaagggtacgactctgtgggagaagctacccttacactcaatgagattagagaaatttacttaatttggttggtggatatttatcataaaaaacccaatcagagaggcactaattgtcctaatgttgcgtggaaaaagggttgtcaagaatgggaaccagaggagttctctggttctaaagacgaattagactttaaatttgctattgttgattacaaacaacttactaaagtagggataactgtctacaaagaactgagttatagcaatgaccgtttagctgaatatagagggaagaaaggaaaccataaagttcagttcaagtataaccctgagtgtatggcagttatttgggtgttggatgaggatatgaatgagtactttacagttaatgcgattgactacgaatatgcaagtagagtatcactttggcaacataaatataacatgaaatatcaagcagaactaaattcagcagaatatgatgaggacaaggaaattgatgcagaaataaaaattgaagaaatcgcagatcgttcaattgttaagactaacaaaatcagagctcggaggcgtggcgctaggcatcaagagaatagcgcaagggctaagtcaatcagtaatgcgaacccggcctcgatacaaaaacatgaagatgaaatcgttagtgcagataatgacgattgggatattgattatgtctgagaaatcgtcaaatgagtgaaacgcgtgaggctcgtatatcaagagctaaaagggcatttgtatccacaccgagcgttaggaaaatcttgagttacatggatagatgtagagatctatcagacctagagtctgagcctacatgcatgatggtctatggtgcttcgggtgtaggtaaaacgaccgtcatcaagaaatacttaaatcaaaacagaagagagtccgaagccgggggcgatataataccggttttgcatattgagttgccagacaatgcgaagccagtagatgcagcaagggaattgctggttgaaatgggtgacccgctagcactttatgaaactgacttagctagattgacgaaaagactgactgaattaatccctgcggtcggcgtgaagctgattattatcgatgagttccaacatttggtggaagaaaggtcaaatcgggttcttacccaagtaggtaattggctaaaaatgatacttaacaaaacgaaatgtccaattgttatatttggtatgccatactcaaaagttgtactgcaagcaaactcgcaacttcacgggcgattttccattcaggttgaactgcgcccctttagctaccagggaggtagaggtgtatttaaaacttttttggaataccttgataaagccctaccttttgaaaaacaggctggcttagccaacgaaagtttgcagaaaaaattgtatgcattctctcagggaaacatgcgttcgttgagaaaccttatttatcaagcatctatcgaagcaattgataatcagcatgagacgataaccgaagaagatttcgtttttgcatcgaagttgacatcgggcgataaacccaactcatggaaaaatccttttgaggagggtgttgaggtaacagaagatatgttacgaccgccaccaaaagatattggttgggaggactatttgagacattcaaccccgagagtgagtaaaccaggtagaaataaaaactttttcgaataacctaggctgctggaaggagatatacatatgtttttgcaaagacctaaaccttacagcgatgaaagtttagaaagtttctttatccgagtggctaacaaaaatggctacggtgatgtccatcgcttcctagaagccactaaacgattccttcaagacattgaccataatggctatcaaacctttccgactgatataactcggataaacccatactcagctaaaaacagttccagcgcacgaactgcgtcattcctgaaacttgcacaattgacatttaatgaaccgccagagctacttgggttggcaattaacagaacaaacatgaaatactcgccgtcaactagcgcggttgttagaggtgcagaagtctttcctcgcagtttactacggacgcactccatcccctgctgtcctttgtgtctgcgagaaaatggctacgcctcctacctttggcactttcaggggtacgaatactgccacagccataacgtacctttaattaccacttgtagctgtggtaaggagtttgactaccgagtatctgggttaaagggcatttgctgcaaatgcaaggagcctatcaccttaaccagcagggagaacggtcatgaggcagcgtgtactgtttcaaactggcttgctggccatgaatctaaacctctgccaaatcttcctaaaagctaccgatggggtttagttcattggtggatgggtattaaagatagcgagttcgatcacttttcgttcgttcaatttttctcaaactggccaaggtcattccactcgataatcgaagatgaagtagagttcaaccttgagcatgctgttgtcagcacgtctgaattacgactaaaagatcttcttggtcgattgtttttcggttcaattcggttacctgagcggaatcttcaacacaatatcatccttggtgagcttctctgctatttagaaaatcgtttatggcaagacaagggattaatcgccaacctcaaaatgaacgcgttagaggcgactgtaatgttaaattgtagcctcgatcagattgcatcaatggttgaacaacgcatcttgaagccaaatcgaaaaagcaagcccaacagccctcttgatgttaccgattatctatttcatttcggcgatattttctgtctttggttagctgagttccaaagcgatgagtttaaccgttcgttttatgtgtcgaggtggtaaatgcaaactctgaaagaactaatcgcatccaatcctgacgacttaacaactgaacttaagagagcatttcgtccactcacaccgcatattgcaattgatggtaatgaacttgacgcactgacgatattagtcaatttaaccgataagactgatgatcagaaagacctgctcgatcgagccaaatgcaagcaaaaacttcgagatgaaaaatggtgggctagctgcataaattgcgttaattacagacaaagccataacccaaaattcccggatatacgttctgaaggcgtgattcgaacccaagccctgggtgaattaccgagtttcctactctcgtcctcaaaaatcccaccataccattggtcatatagccatgattcaaaatacgtcaacaaaagcgcattcctcaccaatgagttttgttgggatggtgagatctcatgtttgggtgagcttcttaaagatgcagatcacccactttggaatactttgaaaaagttaggttgttctcaaaaaacttgcaaagcaatggcaaaacaactagctgatattactctcacgactatcaatgtcacactcgcaccaaattacctgactcaaatatctctccccgatagtgatacatcctacatttcactctctcctgttgcatcgctatcgatgcaaagccactttcatcagaggctccaagatgaaaatcggcatagcgcgataacgcggtttagccgaactaccaacatgggggtcactgcgatgacatgtggcggcgcatttagaatgttaaagtctggcgctaagttttccagcccccctcatcaccgattaaacagtaaacgaagttggttgacgtcagagcatgttcagtcattaaaacagtaccagcgcctcaacaaaagcctcatacctgaaaactctcggattgcactccgtagaaaatacaaaatcgagcttcaaaatatggtcagatcttggtttgcaatgcaagaccatacccttgattcgaacatacttatccaacatttgaatcatgacctatcttacttaggagccacaaaacgttttgcatacgatccagcgatgaccaagctctttactgagcttttgaaacgagagttatcaaattcaatcaataatggtgagcaacacactaatggatcgtttttagtcctaccgaatatcagggtttgtggcgcaacagctttaagctccccggtaacggtggggattccatcacttacagctttctttggcttcgttcacgcatttgaacggaatataaatcgcaccacctcatcgtttcgtgttgaatcctttgcgatatgcgtccatcaactacatgtcgagaagcgaggtttgacagcagagtttgtggaaaaaggcgacgggactatatccgctcccgcgacccgggatgactggcagtgtgatgtcgtatttagccttattttgaacaccaactttgctcaacatattgaccaagatacgttagttacatcactaccaaagcgattggctcggggttcagcaaaaattgcgattgatgactttaaacatatcaactcattctcgacattagaaacagcgatcgaatctctgccaatagaagctggtaggtggttatcactttacgcacagtcaaacaataatctaagtgatctattagcagccatgacagaggaccatcagctcatggcaagctgcgtcggttaccacttgttagaagagcccaaagataaaccaaactccctcagaggttacaaacacgctatcgccgagtgcatcattggactcattaactcaatcacctttagctcagagactgatcccaacacaatcttttggtcgctaaagaactatcaaaactacctagtggtacagccaaggagtatcaacgatgaaactaccgacaaatctagcctatgagcgctctatcgacccatcagatgtctgtttttttgtcgtctggcccgatgatagaaaaacacctttaacctacaattctcgtactctgctcgggcaaatggaagcggcatcattagcctatgatgtctcaggtcaaccaataaaaagtgccaccgctgaggcgttagctcaagggaaccctcatcaagttgatttctgccacgttccatacggtgcgagtcatattgaatgcagtttctccgtctcgttttcttctgaactacgtcaaccatataagtgtaactcaagcaaagttaaacaaacgctagtgcaattagtcgagctctacgaaacgaaaatcggctggactgagctagcaacccgatatttgatgaacatttgcaacggtaaatggctgtggaaaaatacccgtaaagcctattgctggaacattgtacttacaccttggccttggaacggggaaaaggttggatttgaagatattcgtactaactacacctcacggcaagactttaaaaataataaaaattggtctgctatagttgaaatgatcaaaaccgcattttctagtactgatgggctggcgatatttgaagtcagggccaccttgcacttgccaacgaatgctatggtgcggccaagccaagttttcacagaaaaagaaagtggcagtaaaagtaaatctaaaactcaaaacagtcgagtttttcagagtacaactattgatggtgaacgatcgccaatactaggggcctttaaaacgggagcagctattgcaaccattgacgactggtatcctgaagccactgagccactaagggtcggacggtttggggttcatcgcgaagatgtcacttgctaccgtcatccgtctaccggaaaagattttttctcgatattacaacaagcagagcactatattgaagtgttgagcgccaacaaaactcccgctcaagaaactatcaacgacatgcactttttaatggctaacctgattaagggtgggatgttccagcataaaggagactgactgtgaaatggtattataagacaatcacctttctgccagagttgtgcaacaacgagtcactggctgcaaagtgtctccgcgttctgcatggatttaactatcagtatgagacacgaaatatcggcgtttcatttccgctttggtgtgatgcaacggttggaaaaaagatttcatttgtcagcaagaacaagatagaactcgacttactacttaaacaacactatttcgtccaaatggaacaacttcaatactttcatatatccaacactgttctcgtcccagaagattgtacatacgtttcctttagacgctgtcaatctatagataagctcacagcagcagggctggcaaggaaaatcagacgcctggagaaacgtgctctatctagaggcgagcaatttgacccatcatcttttgctcaaaaagagcatactgcaatagcgcactaccactcacttggggagtccagcaaacagacgaaccgcaactttcgactcaatatcaggatgctctcggagcaaccccgtgaggggaactcgatttttagtagctatggcttatcaaattcagaaaactcgtttcagcctgtacccttaatctgacgatataccatgggtgaactgccgagtaggtagctgataacagtgcatcctcggccacgaattctgcggccacgtgaactgccgagtaggtagctgataacggatccgaattcgctgctgccaccgctgagcaataactagcataaccccttggggcctctaaacgggtcttgaggggttttttgctgaaacctcaggcatgttggaacaaccataaaatgataattacacccataaattgataattatcacacccataaattgatattgcctcttcatggtctaaacttcagtaagtttacgacattttcatgaagaggtcatttccggggatccatggagaaaaaaatcactggatataccaccgttgatatatcccaatggcatcgtaaagaacattttgaggcatttcagtcagttgctcaatgtacctataaccagaccgttcagctggatattacggcctttttaaagaccgtaaagaaaaataagcacaagttttatccggcctttattcacattcttgcccgcctgatgaatgctcatccggagttccgtatggcaatgaaagacggtgagctggtgatatgggatagtgttcacccttgttacaccgttttccatgagcaaactgaaacgttttcatcgctctggagtgaataccacgacgatttccggcagtttctacacatatattcgcaagatgtggcgtgttacggtgaaaacctggcctatttccctaaagggtttattgagaatatgtttttcgtctcagccaatccctgggtgagtttcaccagttttgatttaaacgtggccaatatggacaacttcttcgcccccgttttcactatgggcaaatattatacgcaaggcgacaaggtgctgatgccgctggcgattcaggttcatcatgccgtttgtgatggcttccatgtcggcagaatgcttaatgaattacaacagtactgcgatgagtggcagggcggggcgtaatttttttaaggcagttattggtgcccttctagagtccttactgcagtagttttgctgaaatactcgattcacaaaaatatcaacttatggttgttttgtgagatatcaatatatggttgttttgtggttaagttgctgattataaataattattaaatatcactttatggttgcatcaacaggtaccgagctcgaattcactggccgtcgttttacaacgtcgtgactgggaaaaccctggcgttacccaacttaatcgccttgcggccagtttgctcaggctctccccgtggaggtaataattgacgatatgatcatttattctgcctcccagagcctgataaaaacggtgaatccgttagcgaggtgccgccggcttccattcaggtcgaggtggcccggctccatgcaccgcgacgcaacgcggggaggcagacaaggtatagggcggcgaggcggctacagccgatagtctggaacagcgcacttacgggttgctgcgcaacccaagtgctaccggcgcggcagcgtgacccgtgtcggcggctccaacggctcgccatcgtccagaaaacacggctcatcgggcatcggcaggcgctgctgcccgcgccgttcccattcctccgtttcggtcaaggctggcaggtctggttccatgcccggaatgccgggctggctgggcggctcctcgccggggccggtcggtagttgctgctcgcccggatacagggtcgggatgcggcgcaggtcgccatgccccaacagcgattcgtcctggtcgtcgtgatcaaccaccacggcggcactgaacaccgacaggcgcaactggtcgcggggctggccccacgccacgcggtcattgaccacgtaggccgacacggtgccggggccgttgagcttcacgacggagatccagcgctcggccaccaagtccttgactgcgtattggaccgtccgcaaagaacgtccgatgagcttggaaagtgtcttctggctgaccaccacggcgttctggtggcccatctgcgccacgaggtgatgcagcagcattg

SEQ ID NO: 114 - DNA, 1335 bp, artificial sequence
  Synthetic
tgcaggtggatttgcccctatatttccagacatctgttatcacttaaccattacaagcccgctgccgcagatattcccgtggcgagcgataacccagcgcactatgcggatgccattcgttataatgctcgaacgcctctgcaaggttctttgctgccgttaacccgtctggtttgggcatgatactgatgtagtcacgctttatcgttttcacgaagctctctgctattccgttactctccggactccgcaccgccgtgttcttcggttcaagtcccaacatccgggcgaactggcgtgtttcattagcccggtagcatgaaccattatccgtcagccactccactggagacgacggaagatcgttgccgaagcggcgttccaccgctcccagcatgacgtcctgtactgtttcactgttgaagccgccggtagtgaccgcccagtgcagtgcctcacgatcacagcagtccagcgcgaacgtgacacgcagtctctctccgttatcacagcagaactcgaacccgtcagagcaccatcgctgattgctttctttcacggccactctgcctgtatgtgcccgtttcgatggcggtacagcaggttttcgctcaagcaacagcgcattctggcgcatgatccggtaaacacgtttggcattgatcgcaggcataccatcaagttctgcctgtctgcgaagcagcgcccatacccgacgataaccatacgttggcagctctccgataacatggtgtatacggagaagcacatccgtatcatcagtgtgacgactgcggcggccatccatccagtcatcggttcgtctgagaatgacgtgcaactgcgcacgcgacacccggagacaacggctgactaagcttactccccatccccggcaataagggcgcgtgcgctatccacttttttgcccgtccatattcaacggcttctttgaggagttcattttccatcgttttcttgccgagcaggcgctggagttctttaatctgcttcatggcggcagcaagttcagaggcaggaacaacctgttctccggcggcgacagcagtaagacttccttcctggtattgcttacgccagagaaataactggctggctgctacaccatgttgccgggcaacgagggagaccgtcatccccggttcaaagctctgctgaacaattgcgatcttttcctgtgtggtacgccgtctgcgtttctccggccctaagacatcaatcatctgttctccaatgactagtctaaaaactagtattaagactatcacttatttaagtgatattggttgtctggagattcagggggccagtcta

SEQ ID NO: 115 - DNA, 623 bp, artificial sequence
  Synthetic
gcccgacgataaccatacgttggcagctctccgataacatggtgtatacggagaagcacatccgtatcatcagtgtgacgactgcggcggccatccatccagtcatcggttcgtctgagaatgacgtgcaactgcgcacgcgacacccggagacaacggctgactaagcttactcccccatccccgggcaataagggcgcgtgcgctatccacttttttgcccgtccatattcaacggcttctttgaggagttcattttccatcgttttcttgccgagcaggcgctggagttctttaatctgcttcatggcggcagcaagttcagaggcaggaacaacctgttctccggcggcgacagcagtaagacttccttcctggtattgcttacgccagagaaataactggctggctgctacaccatgttgccgggcaacgagggagaccgtcatcccggttcaaagctctgctgaacaattgcgatcttttcctgtgtggtacgccgtctgcgtttctccggccctaagacatcaatcatctgttctccaatgactagtctaaaaactagtattagactatcacttatttaagtgatattggttgtctggagattcagggggccagtc

SEQ ID NO: 116 - DNA, 1338 bp, artificial sequence
  Synthetic
tgcaggtggatttgcccctatatttccagacatctgttatcacttaacccattacaagcccgctgccgcagatattcccgtggcgagcgataacccagcgcactatgcggatgccattcgttataatgctcgaacgcctctgcaaggttctttgctgccgttaacccgtctggtttgggcatgatactgatgtagtcacgctttatcgttttcacgaagctctctgctattccgttactctccggactccgcaccgccgtgttcttcggttcaagtcccaacatccgggcgaactggcgtgtttcattagcccggtagcatgaaccattatccgtcagccactccactggagacgacggaagatcgttgccgaagcggcgttccaccgctcccagcatgacgtcctgtactgtttcactgttgaagccgccggtagtgaccgcccagtgcagtgcctcacgatcacagcagtccagcgcgaacgtgacacgcagtctctctccgttatcacagcagaactcgaacccgtcagagcaccatcgctgattgctttctttcacggccactctgcctgtatgtgcccgtttcgatggcggtacagcaggttttcgctcaagcaacagcgcattctggcgcatgatccggtaaacacgtttggcattgatcgcaggcataccatcaagttctgcctgtctgcgaagcagcgcccatacccgacgataaccatacgttggcagctctccgataacatggtgtatacggagaagcacatccgtatcatcagtgtgacgactgcggcggccatccatccagtcatcggttcgtctgagaatgacgtgcaactgcgcacgcgacacccggagacaacggctgactaagcttactccccatccccgggcaataagggcgcgtgcgctatccacttttttgcccgtccatattcaacggcttctttgaggagttcattttccatcgttttcttgccgagcaggcgctggagttctttaatctgcttcatggcggcagcaagttcagaggcaggaacaacctgttctccggcggcgacagcagtaagacttccttcctggtattgcttacgccagagaaataactggctggctgctacaccatgttgccgggcaacgagggagaccgtcatccccggttcaaagctctgctgaacaattgcgatcttttcctgtgtggtacgccgtctgcgtttctcccggccctaagacatcaatcatctgttctccaatgactagtctaaaaactagtataaagactatcacttatttaagtgatattggttgtctggagattcagggggccagtcta

SEQ ID NO: 117 - DNA, 619 bp, artificial sequence
  Synthetic
caccgacgatacatacgttggcagctctccgataacatggtgtatacggagaagcacatccgtatcatcagtgtgacgactgcggcggccatccatccagtcatcggttcgtctgagaatgacgtgcaactgcgcacgcgacacccggagacaacggctgactaagcttactccccatcccgggcaataagggcgcgtgcgctatccacttttttgcccgtccatattcaacggcttctttgaggagttcattttccatcgttttcttgccgagcaggcgctggagttctttaatctgcttcatggcggcagcaagttcagaggcaggaacaacctgttctccggcggcgacagcagtaagacttccttcctggtattgcttacgccagagaaataactggctggctgctacaccatgttgccgggcaacgagggagaccgtcatcccggttcaaagctctgctgaacaattgcgatcttttcctgtgtggtacgccgtctgcgtttctccgcctaagacatcaatcatctgttctccaatgactagtctaaaaactagtattaagactatcacttatttaagtgatattggttgtctggagattcaggggccagtcta

SEQ ID NO: 118 - DNA, 980 bp, artificial sequence
  Synthetic
cagcaatgttgatacaaccataaaatgataattacacccataaattgataattatcacacccataaattgatattgcctcttcatggtctaaacttcagtaagtttacgacattttcctcgaggtcatttccggggatccatggagaaaaaaatcactggatataccaccgttgatatatcccaatggcatcgtaaagaacattttgaggcatttcagtcagttgctcaatgtacctataaccagaccgttcagctggatattacggcctttttaaagaccgtaaagaaaaataagcacaagttttatccggcctttattcacattcttgcccgcctgatgaatgctcatccggagttccgtatggcaatgaaagacggtgagctggtgatatgggatagtgttcacccttgttacaccgttttccatgagcaaactgaaacgttttcatcgctctggagtgaataccacgacgatttccggcagtttctacacatatattcgcaagatgtggcgtgttacggtgaaaacctggcctatttccctaaagggtttattgagaatatgtttttcgtctcagccaatccctgggtgagtttcaccagttttgatttaaacgtggccaatatggacaacttcttcgcccccgttttcactatgggcaaatattatacgcaaggcgacaaggtgctgatgccgctggcgattcaggttcatcatgccgtttgtgatggcttccatgtcggcagaatgcttaatgaattacaacagtactgcgatgagtggcagggggggcgtaatttttttaaggcagttattggtgcccttctagagtccttactgcagtagttttgctgaaatactcgattcacaaaaatatcaacttatggttgttttgtgagatatcaatatatggttgttttgtggttaagttgctgattataaataattattaaatatcactttatggttgcatcaaca

SEQ ID NO: 119 - DNA, 1335 bp, artificial sequence
  Synthetic
tgcaggtggatttgcccctatatttccagacatctgttatcacttaacccattacaagcccgctgccgcagatattcccgtggcgagcgataacccagcgcactatgcggatgccattcgttataatgctcgaacgcctctgcaaggttctttgctgccgttaacccgtctggtttgggcatgatactgatgtagtcacgctttatcgttttcacgaagctctctgctattccgttactctccggactccgcaccgccgtgttcttcggttcaagtcccaacatccgggcgaactggcgtgtttcattagcccggtagcatgaaaccattatccgtcagccactcactggagacgacggaagatcgttgccgaagcggcgttccaccgctcccagcatgacgtcctgtactgtttcactgttgaagccgccggtagtgaccgcccagtgcagtgcctcacgatcacagcagtccagcgcgaacgtgacacgcagtctctctccgttatcacagcagaactcgaacccgtcagagcaccatcgctgattgctttctttcacggccactctgcctgtatgtgcccgtttcgatggcggtacagcaggttttcgctcaagcaacagcgcattctggcgcatgatccggtaaacacgtttggcattgatcgcaggcataccatcaagttctgcctgtctgcgaagcagcgcccatacccgacgataaccatacgttggcagctctccgataacatggtgtatacggagaagcacatccgtatcatcagtgtgacgactgcggcggccatccatccagtcatcggttcgtctgagaatgacgtgcaactgcgcacgcgacacccggagacaacggctgactaagcttactccccatccccgggcaataagggcgcgtgcgctatccacttttttgcccgtccatattcaacggcttctttgaggagttcattttccatcgttttcttgccgagcaggcgctggagttcttaatctgcttcatggcggcagcaagttcagaggcaggaacaacctgttctccggcggcgacagcagtaagacttccttcctggtattgcttacgccagagaaataactggctggctgctacaccatgttgcgggcaacgagggagaccgtcatccccggttcaaagctctgctgaacaattgcgatcttttcctgtgtggtacgccgtctgcgtttctccggccctaagacatcaatcatctgttctccaatgactagtctaaaaactagtattaagactatcacttatttaagtgatattggttgtctggagattcagggggccagtcta

SEQ ID NO: 120 - DNA, 620 bp, artificial sequence
  Synthetic
gccgacgataaccatacgttggcagctctccgataacatggtgtatacggagaagcacatccgtatcatcagtgtgacgactgcggcggccatccatccagtcatcggttcgtctgagaatgacgtgcaactgcgcacgcgacacccggagacaacggctgactaagcttactccccatccccgggcaataagggcgcgtgcgctatccacttttttgcccgtccatattcaacggcttctttgaggagttcattttccatcgttttcttgccgagcaggcgctggagttctttaatctgcttcatggcggcagcaagttcagagcaggaacaacctgttctccggcggcgacagcagtaagacttccttcctggtattgcttacgccagagaaataactggctggctgctacaccatgttgccgggcaacgagggagaccgtcatccccggttcaaagctctgctgaacaattgcgatcttttcctgtgtggtacgccgtctgcgtttctccggccctaagacatcaatcatctgttctccaatgactagtctaaaaaactgtattaagactatcacttatttaagtgatattggttgtctggagattcagggggccag

SEQ ID NO: 121 - DNA, 981 bp, artificial sequence
  Synthetic
tacaaaaattgttgatgcaaccataaagtgatatttaataattatttataatcagcaacttaaccacaaaacaaccatatattgatatctcacaaaacaaccataagttgatatttttgtgaatcgagtatttcagcaaaactactgcagtaaggactctagaagggcaccaataactgcctttaaaaaattacgccccgccctgccactcatcgcagtactgttgtaattcattaagcattctgccgacatggaagccatcacaaacggcatgatgaacctgaatcgccagcggcatcagcaccttgtcgccttgcgtataatatttgcccatagtgaaaacgggggcgaagaagttgtccatattggccacgtttaaatcaaaactggtgaaactcacccagggattggctgagacgaaaaacatattctcaataaaccctttagggaaataggccaggttttcaccgtaacacgccacatcttgcgaatatatgtgtagaaactgccggaaatcgtcgtggtattcactccagagcgatgaaaacgtttcagtttgctcatggaaaacggtgtaacaagggtgaacactatcccatatcaccagctcaccgtctttcattgccatacggaactccggatgagcattcatcaggcgggcaagaatgtgaataaaggccggataaaacttgtgcttatttttctttacggtctttaaaaaggccgtaatatccagctgaacggtctggttataggtacattgagcaactgactgaaatgcctcaaaatgttctttacgatgccattgggatatatcaacggtggtatatccagtgatttttttctccatggatccccggaaatgacctcgaggaaaatgtcgtaaacttactgaagtttagaccatgaagaggcaatatcaatttatgggtgtgataattatcaatttatgggtgtaattatcattttatggttgtatca

SEQ ID NO: 122 - DNA, 1336 bp, artificial sequence
  Synthetic
tgcaggtggatttgcccctatatttccagacatctgttatcacttaacccattacaagcccgctgccgcagatattcccgtggcgagcgataacccagcgcactatgcggatgccattcgttataatgctcgaacgcctctgcaaggttctttgctgccgttaacccgtctggtttgggcatgatactgatgtagtcacgctttatcgttttcacgaagctctctgctattccgttactctccggactccgcaccgccgtgttcttcggttcaagtcccaacatccgggcgaactggcgtgtttcattagcccggtagcatgaaccattatccgtcagccactccactggagacgacggaagatcgttgccgaagcggcgttccaccgctcccagcatgacgtcctgtactgtttcactgttgaagccgccggtagtgaccgcccagtgcagtgcctcacgatcacagcagtccagcgcgaacgtgacacgcagtctctctccgttatcacagcagaactcgaacccgtcagagcaccatcgctgattgctttctttcacggccactctgcctgtatgtgcccgtttcgatggcggtacagcaggttttcgctcaagcaacagcgcattctggcgcatgatccggtaaacacgtttggcattgatcgcaggcataccatcaagttctgcctgtctgcgaagcagcgcccatacccgacgataaccatacgttggcagctctccgataacatggtgtatacggagaagcacatccgtatcatcagtgtgacgactgcggcggccatccatccagtcatcggttcgtctgagaatgacgtgcaactgcgcacgcgacacccggagacaacggctgactaagcttactccccatccccgggcaataagggcgcgtgcgctatccacttttttgcccgtccatattcaacggcttctttgaggagttcattttccatcgtttcttgccgagcaggcgctggagttctttaatctgcttcatggcggcagcaagttcagaggcaggaacaacctgttctccggcggcgacagcagtaagacttccttcctggtattgcttacgccagagaaataactggctggctgctacaccatgttgccgggcaacgagggagaccgtcatccccggttcaaagctctgctgaacaattgcgatcttttcctgtgtggtacgccgtctgcgtttctccggccctaagacatcaatcatctgttctccaatgactagtctaaaaactagtattaagactatcacttatttaagtgatattggttgtctggagattcagggggccagtcta

SEQ ID NO: 123 - DNA, 621 bp, artificial sequence
  Synthetic
cacccgacgataaccatacgttggcagctctccgataacatggtgtatacggagaagcacatccgtatcatcagtgtgacgactgcggcggccatccatccagtcatcggttcgtctgagaatgacgtgcaactgcgcacgcgacacccggagacaacggctgactaagcttactccccatccccgggcaataagggcgcggtgcgctatccacttttttgcccgtccatattcaacggcttctttgaggagttcattttccatcgttttcttgccgagcaggcgctggagttctttaatctgcttcatggcggcagcaagttcagaggcaggaacaacctgttctccggcggcgacagcagtaagacttccttcctggtattgcttacgccagagaaataactggctggctgctacaccatgttgccgggcaacgagggagaccgtcatccccggttcaaagctctgctgaacaattgcgatcttttcctgtgtggtacgccgtctgcgtttctctcggccctaagacatcaatcatctgttctccaatgactagtctaaaaactagtattaagactatcacttatttaagtgatattggttgtctggagattcaggggg

SEQ ID NO: 124 - DNA, 983 bp, artificial sequence
  Synthetic
gcagcaactgttgatacaaccataaaatgataattacacccataaattgataattatcacacccataaattgatattgcctcttcatggtctaaaacttcagtaagtttacgacattttcctcgaggtcatttccggggatccatggagaaaaaaatcactggatataccaccgttgatatatcccaatggcatcgtaaagaacattttgaggcatttcagtcagttgctcaatgtacctataaccagaccgttcagctggatattacggcctttttaaagaccgtaaagaaaaataagcacaagttttatccggcctttattcacattcttgcccgcctgatgaatgctcatccggagttccgtatggcaatgaaagacggtgagctggtgatatgggatagtgttcacccttgttacaccgtttttccatgagcaaactgaaacgttttcatcgctctggagtgaataccacgacgatttccggcagtttctacacatatattcgcaagatgtggcgtgttacggtgaaaacctggcctatttccctaaagggtttattgagaatatgtttttcgtctcagccaatccctgggtgagtttcaccagttttgatttaaacgtggccaatatggacaacttcttcgcccccgttttcactatgggcaaatattatacgcaaggcgacaaggtgctgatgccgctggcgattcaggttcatcatgccgtttgtgatggcttccatgtcggcagaatgcttaatgaattacaacagtactgcgatgagtggcagggcggggcgtaatttttttaaggcagttattggtgcccttctagagtccttactgcagtagttttgctgaaatactcgattcacaaaaatatcaacttatggttgttttgtgagatatcaatatatggttgttttgtggttaagttgctgattataaataattattaaatatcactttatggttgcatcaa

SEQ ID NO: 125 - DNA, 981 bp, artificial sequence
  Synthetic
tacaaaaattgttgatgcaaccataaagtgatatttaataattatttataatcagcaacttaaccacaaaacaaccatatattgatatctcacaaaacaaccataagttgatatttttgtgaatcgagtatttcagcaaaactactgcagtaaggactctagaagggcaccaataactgccttaaaaaaattacgccccgccctgccactcatcgcagtactgttgtaattcattaagcattctgccgacatggaagccatcacaaacggcatgatgaacctgaatcgccagcggcatcagcaccttgtcgccttgcgtataatatttgcccatagtgaaaacgggggcgaagaagttgtccatattggccacgtttaaatcaaaactggtgaaactcacccagggattggctgagacgaaaaacatattctcaataaaccctttagggaaataggccaggttttcaccgtaacacgccacatcttgcgaatatatgtgtagaaactgccggaaatcgtcgtggtattcactccagagcgatgaaaacgtttcagtttgctcatggaaaacggtgtaacaagggtgaacactatcccatatcaccagctcaccgtctttcattgccatacggaactccggatgagcattcatcaggcgggcaagaatgtgaataaaggccggataaaacttgtgcttatttttctttacggtctttaaaaaggccgtaatatccagctgaacggtctggttataggtacattgagcaactgactgaaatgcctcaaaatgttctttacgatgccattgggatatatcaacggtggtatatccagtgatttttttctccatggatccccggaaatgacctcgaggaaaatgtcgtaaacttactgaagtttagaccatgaagaggcaatatcaatttatgggtgtgataattatcaatttatgggtgtaattatcattttatggttgtatca

SEQ ID NO: 126 - DNA, 1337 bp, artificial sequence
  Synthetic
tgcaggtggatttgcccctatatttccagacatctgttatcacttaacccattacaagcccgctgccgcagatattcccgtggcgagcgataacccagcgcactatgcggatgccattcgttataatgctcgaacgcctctgcaaggttctttgctgccgttaacccgtctggtttgggcatgatactgatgtagtcacgctttatcgttttcacgaagctctctgctattccgttactctccggactccgcaccgccgtgttcttcggttcaagtcccaacatccgggcgaactggcgtgtttcattagcccggtagcatgaaccattatccgtcagccactccactggagacgacggaagatcgttgccgaagcggcgttccaccgctcccagcatgacgtcctgtactgtttcactgttgaagccgccggtagtgaccgcccagtgcagtgcctcacgatcacagcagtccagcgcgaacgtgacacgcagtctctctccgttatcacagcagaactcgaacccgtcagagcaccatcgctgattgctttctttcacggccactctgcctgtatgtgcccgtttcgatggcggtacagcaggttttcgctcaagcaacagcgcattctggcgcatgatccggtaaacacgtttggcattgatcgcaggcataccatcaagttctgcctgtctgcgaagcagcgcccatacccgacgataaccatacgttggcagctctccgataacatggtgtatacggagaagcacatccgtatcatcagtgtgacgactgcggcggccatccatccagtcatcggttcgtctgagaatgacgtgcaactgcgcacgcgacacccggagacaacggctgactaagcttactccccatccccgggcaataagggcgcgtgcgctatccacttttttgcccgtccatattcaacggcttctttgaggagttcattttccatcgttttcttgccgagcaggcgctggagttctttaatctgcttcatggcggcagcaagttcagaggcaggaacaacctgttctccggcggcgacagcagtaagacttccttcctggtattgcttacgccagagaaataactggctggctgctacaccatgttgccgggcaacgagggagaccgtcatccccggttcaaagctctgctgaacaattgcgatcttttcctgtgtggtacgccgtctgcgtttctccggccctaagacatcaatcatctgttctccaatgactagtctaaaaactagtattaagactatcacttatttaagtgatattggttgtctggagattcagggggccagtcta

SEQ ID NO: 127 - DNA, 624 bp, artificial sequence
  Synthetic
gacccgacgataaccatacgttggcagctctccgataacatggtgtatacggagaagcacatccgtatcatcagtgtgacgactgcggcggccatccatccagtcatcggttcgtctgagaatgacgtgcaactgcgcacgcgacacccggagacaacggctgactaagcttactccccatccccgggcaataagggcgcgtgcgctatccacttttttgcccgtccatattcaacggcttctttgaggagttcattttccatcgttttcttgccgagcaggcgctggagttctttaatctgcttcatggcggcagcaagttcagaggcaggaacaacctgttctccggcggcgacagcagtaagacttccttcctggtattgcttacgccagagaaataactgctggctgctacaccatgttgccgggcaacgagggagaccgtcatccccggttcaaagctctgctgaacaattgcgatcttttcctgtgtggtacgccgtctgcgtttctccggccctaagacatcaatcatctgttctccaatgactagtctaaaaactagtattaagactatcacttatttaagtgatattggttgtctggagattcagggggccagtc

SEQ ID NO: 128 - DNA, 981 bp, artificial sequence
  Synthetic
gcagcaactgttgatacaaccataaaatgataattacacccataaattgataattatcacacccataaattgatattgcctcttcatggtctaaacttcagtaagtttacgacattttcctcgaggtcatttccggggatccatggagaaaaaaatcactggatataccaccgttgatatatcccaatggcatcgtaaagaacattttgaggcatttcagtcagttgctcaatgtacctataaccagaccgttcagctggatattacggcctttttaaagaccgtaaagaaaaataagcacaagttttatccggcctttattcacattcttgcccgcctgatgaatgctcatccggagttccgtatggcaatgaaagacggtgagctggtgatatgggatagtgttcacccttgttacaccgttttccatgagcaaactgaaacgttttcatcgctctggagtgaataccacgacgatttccggcagtttctacacatatattcgcaagatgtggcgtgttacggtgaaaacctggcctatttccctaaagggtttattgagaatatgtttttcgtctcagccaatccctgggtgagtttcaccagttttgatttaaacgtggccaatatggacaacttcttcgcccccgttttcactatgggcaaatattatacgcaaggcgacaaggtgctgatgccgctggcgattcaggttcatcatgccgtttgtgatggcttccatgtcggcagaatgcttaatgaattacaacagtactgcgatgagtggcagggcggggcgtaatttttttaaggcagttattggtgcccttctagagtccttactgcagtagttttgctgaaatactcgattcacaaaaatatcaacttatggttgttttgtgagatatcaatatatggttgttttgtggttaagttgctgattataaataattattaaatatcactttatggttgcatcaa

SEQ ID NO: 129 - DNA, 981 bp, artificial sequence
  Synthetic
tacaaaaattgttgatgcaaccataaagtgatatttaataattatttataatcagcaacttaaccaaaaacaaccatatattgatatctcacaaaacaaccataagttgatatttttgtgaatcgagtatttcagcaaaactactgcagtaaggactctagaagggcaccaataactgccttaaaaaaattacgccccgccctgccactcatcgcagtactgttgtaattcattaagcattctgccgacatggaagccatcacaaacggcatgatgaacctgaatcgccagcggcatcagcaccttgtcgccttgcgtataatatttgcccatagtgaaaacgggggcgaagaagttgtccatattggccacgtttaaatcaaaactggtgaaactcacccagggattggctgagacgaaaaaacatattctcaataaaccctttagggaaataggccaggttttcaccgtaacacgccacatcttgcgaatatatgtgtagaaactgccggacgtcgtcgtggtattcactccagagcgatgaaaacgtttcagtttgctcatggaaaacggtgtaacaagggtgaacactatcccatatcaccagctcaccgtctttcattgccatacggaactccggatgagcattcatcaggcgggcaagaatgtgaataaaggccggataaaacttgtgcttatttttctttacggtctttaaaaaggccgtaatatccagctgaacggtctggttataggtacattgagcaactgactgaaatgcctcaaaatgttctttacgatgccattgggatatatcaacggtggtatatccagtgatttttttctccatggatccccggaaatgacctcgaggaaaatgtcgtaaacttactgaagtttagaccatgaagaggcaatatcaatttatgggtgtgataattatcaatttatgggtgtaattatcattttatggttgtatca

SEQ ID NO: 130 - DNA, 980 bp, artificial sequence
  Synthetic
gaatattgttgatacaaccataaaatgataattacacccataaattgataattatcacacccataaattgatattgcctcttcatggtctaaacttcagtaagtttacgacattttcctcgaggtcatttccggggatccatgagagaaaaaatcactggatataccaccgttgatatatcccaatggcatcgtaaagaacattttgaggcatttcagtcagttgctcaatgtacctataaccagaccgttcagctggatattacggcctttttaaagaccgtaaagaaaaataagcacaagttttatccggcctttattcacattcttgcccgcctgatgaatgctcatccggagttccgtatggcaatgaaagacggtgagctggtgatatgggatagtgttcacccttgttacaccgttttccatgagcaaactgaaacgttttcatcgctctggagtgaataccacgacgatttccggcagtttctacacatatattcgcaagatgtggcgtgttacggtgaaaacctggcctatttccctaaagggtttattgagaatatgtttttcgtctcagccaatccctgggtgagtttcaccagttttgatttaaacgtggccaatatggacaacttcttcgcccccgttttcactatgggcaaatattatacgcaaggcgacaaggtgctgatgccgctggcgattcaggttcatcatgccgtttgtgatggcttccatgtcggcgaatgcttaatgaattacaacagtactgcgatgagtggcagggcggggcgtaatttttttaaggcagttattggtgcccttctagagtccttactgcagtagttttgctgaaatactcgattcacaaaaatatcaacttatggttgttttgtgagatatcaatatatggttgttttgtggttaagttgctgattataaataattattaaatatcactttatggttgcatcaaca

SEQ ID NO: 131 - DNA, 32 bp, artificial sequence
  Synthetic
gagacctctgtcttgtcagctagggtggtctc

SEQ ID NO: 132 - DNA, 23 bp, artificial sequence
  Synthetic
cgagaccctcgacgagggtctcg

SEQ ID NO: 133 - DNA, 32 bp, artificial sequence
  Synthetic
tgggaggattcataaagcattgtttgttggct

SEQ ID NO: 134 - DNA, 32 bp, artificial sequence
  Synthetic
agtacagcgcggctgaaatcatcattaaagcg

SEQ ID NO: 135 - DNA, 32 bp, artificial sequence
  Synthetic
cgagtttgtcagaaagcagaccaaacagcggt

SEQ ID NO: 136 - DNA, 32 bp, artificial sequence
  Synthetic
gcattactaagctggcgcgtgaagctgtagaa

SEQ ID NO: 137 - DNA, 32 bp, artificial sequence
  Synthetic
gagaatattgtggcaaaagcgcataaggtgct

SEQ ID NO: 138 - DNA, 32 bp, artificial sequence
  Synthetic
tcttgctgagattgataaggtaattaacctta

SEQ ID NO: 139 - DNA, 32 bp, artificial sequence
  Synthetic
ggtttggtcgcaatgccaaactggcggtgctg

SEQ ID NO: 140 - DNA, 32 bp, artificial sequence
  Synthetic
tgcaaagtggaacattgccattgtttggctat

SEQ ID NO: 141 - DNA, 32 bp, artificial sequence
  Synthetic
gcacgacctgccggaattcagcctgactgaaa

SEQ ID NO: 142 - DNA, 32 bp, artificial sequence
  Synthetic
tggcccagttggtcgagcatatcaacagaacc

SEQ ID NO: 143 - DNA, 23 bp, artificial sequence
  Synthetic
cagcgcggctgaaatcatcatta

SEQ ID NO: 144 - DNA, 23 bp, artificial sequence
  Synthetic
cggataatgcgaacagcgcacgg

SEQ ID NO: 145 - DNA, 23 bp, artificial sequence
  Synthetic
tttagcgaaaccgccaagactgt

SEQ ID NO: 146 - DNA, 23 bp, artificial sequence
  Synthetic
aggcggtcgggatagttttcttg

SEQ ID NO: 147 - DNA, 23 bp, artificial sequence
  Synthetic
cagcggttccttactggcattga

SEQ ID NO: 148 - DNA, 23 bp, artificial sequence
  Synthetic
ttcgacgttcagacgtagtgtga

SEQ ID NO: 149 - DNA, 23 bp, artificial sequence
  Synthetic
atgccgatcgcgtcacactacgt

SEQ ID NO: 150 - DNA, 23 bp, artificial sequence
  Synthetic
gccactcgctttaatgatgattt

SEQ ID NO: 151 - DNA, 23 bp, artificial sequence
  Synthetic
atatgtaaggaatatgacagttt

SEQ ID NO: 152 - DNA, 32 bp, artificial sequence
  Synthetic
cattcaccgttgcaccacagatgaaaagctga

SEQ ID NO: 153 - DNA, 32 bp, artificial sequence
  Synthetic
ctttatcgcggcgacgaacgttttgccatgtg

SEQ ID NO: 154 - DNA, 32 bp, artificial sequence
  Synthetic
ccttcaggagaaacgtcaacgtcgtggaagca

SEQ ID NO: 155 - DNA, 32 bp, artificial sequence
  Synthetic
aatcagaccgatgaattctctctcgactcgcc

SEQ ID NO: 156 - DNA, 32 bp, artificial sequence
  Synthetic
gaaagcgctttccggtggtcagcgtcagcgcg

SEQ ID NO: 157 - DNA, 32 bp, artificial sequence
  Synthetic
gggtaccgtgggccagcatcatcagggccagc

SEQ ID NO: 158 - DNA, 32 bp, artificial sequence
  Synthetic
gggtgccgtggcacagcatcatcagggccagc

SEQ ID NO: 159 - DNA, 32 bp, artificial sequence
  Synthetic
cacgaccgatgatattggcaccggagcgtggg

SEQ ID NO: 160 - DNA, 32 bp, artificial sequence
  Synthetic
ttcgaaggctgcgcgcatttcttcctggctgc

SEQ ID NO: 161 - DNA, 32 bp, artificial sequence
  Synthetic
ggaagatactgttcgataaacgaacacacatg

SEQ ID NO: 162 - DNA, 32 bp, artificial sequence
  Synthetic
taagcgacaaacagaaggggtgccatgcagga

SEQ ID NO: 163 - DNA, 32 bp, artificial sequence
  Synthetic
agtgcatcctcggccacgaattctgcggccac

SEQ ID NO: 164 - DNA, 32 bp, artificial sequence
  Synthetic
gcacatctgaacttcagcctccagtacagcgc

SEQ ID NO: 165 - DNA, 32 bp, artificial sequence
  Synthetic
cgtaggtagtcacgcaactcgccgcacatctg

SEQ ID NO: 166 - DNA, 32 bp, artificial sequence
  Synthetic
gaaaggcgcggtgccgctggcgacctgcgttt

SEQ ID NO: 167 - DNA, 32 bp, artificial sequence
  Synthetic
gtcggcggtgtgcagttcaaccaccgcacgat

SEQ ID NO: 168 - DNA, 32 bp, artificial sequence
  Synthetic
acatacaggccgtagcggtcgcacagcgtgta

SEQ ID NO: 169 - DNA, 32 bp, artificial sequence
  Synthetic
acccagtcccagacgaagccgccctgtaaacg

SEQ ID NO: 170 - DNA, 32 bp, artificial sequence
  Synthetic
ctaatccgagccagtttacccgctctgctacc

SEQ ID NO: 171 - DNA, 32 bp, artificial sequence
  Synthetic
gcgcgtggacgctgggtgtttacttcggtctg

SEQ ID NO: 172 - DNA, 20 bp, artificial sequence
  Synthetic
gtggtattcactccagagcg

SEQ ID NO: 173 - DNA, 20 bp, artificial sequence
  Synthetic
ccatgtcggcagaatgctta

SEQ ID NO: 174 - DNA, 18 bp, artificial sequence
  Synthetic
caacagtactgcgatgag

SEQ ID NO: 175 - DNA, 18 bp, artificial sequence
  Synthetic
gcattgaagctctggcag

SEQ ID NO: 176 - DNA, 20 bp, artificial sequence
  Synthetic
gcccgagtttgtcagaaagc

SEQ ID NO: 177 - DNA, 20 bp, artificial sequence
  Synthetic
caatacgcaaaccgcctctc

SEQ ID NO: 178 - DNA, 20 bp, artificial sequence
  Synthetic
ctgatccacccagtcccaga

SEQ ID NO: 179 - DNA, 19 bp, artificial sequence
  Synthetic
cgccgcacatctgaacttc

SEQ ID NO: 180 - DNA, 20 bp, artificial sequence
  Synthetic
ggagtgacggcagttatctg

SEQ ID NO: 181 - DNA, 18 bp, artificial sequence
  Synthetic
tctttatggcagggtgaa

SEQ ID NO: 182 - DNA, 19 bp, artificial sequence
  Synthetic
gagattcgggatttcggcg

SEQ ID NO: 183 - DNA, 19 bp, artificial sequence
  Synthetic
tattggtcttccacgcagc

SEQ ID NO: 184 - DNA, 18 bp, artificial sequence
  Synthetic
ccggaaatgacctcgagg

SEQ ID NO: 185 - DNA, 22 bp, artificial sequence
  Synthetic
ccggaaatgacctcttcatgaa

SEQ ID NO: 186 - DNA, 28 bp, artificial sequence
  Synthetic
gaattgatgagacaaactattctaaacg

SEQ ID NO: 187 - DNA, 26 bp, artificial sequence
  Synthetic
cagctattagaagtaattgcgacact

SEQ ID NO: 188 - DNA, 19 bp, artificial sequence
  Synthetic
tcggaacagaagctggatg

SEQ ID NO: 189 - DNA, 21 bp, artificial sequence
  Synthetic
tcgtggaggtgattattgctc

SEQ ID NO: 190 - DNA, 19 bp, artificial sequence
  Synthetic
aactcgaggctgatatcgc

SEQ ID NO: 191 - DNA, 18 bp, artificial sequence
  Synthetic
ctgcgtaattcgtcggtg

SEQ ID NO: 192 - DNA, 19 bp, artificial sequence
  Synthetic
tataccgccgtttgtggag

SEQ ID NO: 193 - DNA, 18 bp, artificial sequence
  Synthetic
aacgtaccggaacctgac

SEQ ID NO: 194 - DNA, 19 bp, artificial sequence
  Synthetic
caaaacaggcggcagtaag

SEQ ID NO: 195 - DNA, 18 bp, artificial sequence
  Synthetic
ggtggatcagtcgctgat

SEQ ID NO: 196 - DNA, 20 bp, artificial sequence
  Synthetic
gttttgctacccgttgtagc

SEQ ID NO: 197 - DNA, 21 bp, artificial sequence
  Synthetic
agatagttcgccatcatcagc

SEQ ID NO: 198 - DNA, 18 bp, artificial sequence
  Synthetic
agtggcagttttccctgg

SEQ ID NO: 199 - DNA, 18 bp, artificial sequence
  Synthetic
ttcggtcacgattttcgc

SEQ ID NO: 200 - DNA, 22 bp, artificial sequence
  Synthetic
gcagctcatcactatcaaggag

SEQ ID NO: 201 - DNA, 19 bp, artificial sequence
  Synthetic
tgccgatcaagtacatcac

SEQ ID NO: 202 - DNA, 18 bp, artificial sequence
  Synthetic
tcggcgccgtattacaag

SEQ ID NO: 203 - DNA, 18 bp, artificial sequence
  Synthetic
taaagcgcatcgagctgc

SEQ ID NO: 204 - DNA, 20 bp, artificial sequence
  Synthetic
catgcagtattccaggactc

SEQ ID NO: 205 - DNA, 19 bp, artificial sequence
  Synthetic
ggagagcaaatcttgttgc

SEQ ID NO: 206 - DNA, 20 bp, artificial sequence
  Synthetic
ggagtgacggcagttatctg

SEQ ID NO: 207 - DNA, 24 bp, artificial sequence
  Synthetic
ctgaagtttagaccatgaagaggc

SEQ ID NO: 208 - DNA, 24 bp, artificial sequence
  Synthetic
ggttgttttgtggttaagttgctg

SEQ ID NO: 209 - DNA, 21 bp, artificial sequence
  Synthetic
gtttgttggctacgagaagca

SEQ ID NO: 210 - DNA, 23 bp, artificial sequence
  Synthetic
ggttgttttgtggttaagttgct

SEQ ID NO: 211 - DNA, 23 bp, artificial sequence
  Synthetic
gaagtttagaccatgaagaggca

SEQ ID NO: 212 - DNA, 19 bp, artificial sequence
  Synthetic
tgagagtgttgttgacgcc

SEQ ID NO: 213 - DNA, 20 bp, artificial sequence
  Synthetic
cgaccgcattactaagctgg

SEQ ID NO: 214 - DNA, 19 bp, artificial sequence
  Synthetic
gtgctgggagtgaaaggtg

SEQ ID NO: 215 - DNA, 19 bp, artificial sequence
  Synthetic
ctttggctttaccgccgag

SEQ ID NO: 216 - DNA, 22 bp, artificial sequence
  Synthetic
tgtgttatgacagatgacgtgg

SEQ ID NO: 217 - DNA, 22 bp, artificial sequence
  Synthetic
ctgaacttcagcctccagtaca

SEQ ID NO: 218 - DNA, 23 bp, artificial sequence
  Synthetic
cacaacatacgagcagtccttac

SEQ ID NO: 219 - DNA, 23 bp, artificial sequence
  Synthetic
ggaactccatatatgggctatga

SEQ ID NO: 220 - DNA, 20 bp, artificial sequence
  Synthetic
cgctgatcctttgcgaatac

SEQ ID NO: 221 - DNA, 21 bp, artificial sequence
  Synthetic
cagacgatggtgcaggatatc

SEQ ID NO: 222 - DNA, 20 bp, artificial sequence
  Synthetic
cgatgagcgtggtggttatg

SEQ ID NO: 223 - DNA, 24 bp, artificial sequence
  Synthetic
cactcgctttaatgatgatttcag

SEQ ID NO: 224 - DNA, 19 bp, artificial sequence
  Synthetic
cggatggttcggataatgc

SEQ ID NO: 225 - DNA, 21 bp, artificial sequence
  Synthetic
aaacgcctgccagtatttagc

SEQ ID NO: 226 - DNA, 19 bp, artificial sequence
  Synthetic
caaaacaggcggcagtaag

SEQ ID NO: 227 - DNA, 20 bp, artificial sequence
  Synthetic
cagcctgattgcctggttac

SEQ ID NO: 228 - DNA, 28 bp, artificial sequence
  Synthetic
gaattgatgagacaaactattctaaacg

SEQ ID NO: 229 - DNA, 26 bp, artificial sequence
  Synthetic
cagctattagaagtaattgcgacact

SEQ ID NO: 230 - DNA, 32 bp, artificial sequence
  Synthetic
  misc_feature (31)..(32): n is a, c, g, or t
ctctttccctacacgacgctcttccgatctnn

SEQ ID NO: 231 - DNA, 30 bp, artificial sequence
  Synthetic
agatcggaagagcgtcgtgtagggaaagag

SEQ ID NO: 232 - DNA, 56 bp, artificial sequence
  Synthetic
gactggagttcagacgtgtgctcttccgatctctgaagtttagaccatgaagaggc

SEQ ID NO: 233 - DNA, 22 bp, artificial sequence
  Synthetic
acactctttccctacacgacgc

SEQ ID NO: 234 - DNA, 57 bp, artificial sequence
  Synthetic
acactctttccctacacgacgctcttccgatctggttgttttgtggttaagttgctg

SEQ ID NO: 235 - DNA, 57 bp, artificial sequence
  Synthetic
acactctttccctacacgacgctcttccgatctctgaagtttagaccatgaagaggc

SEQ ID NO: 236 - DNA, 55 bp, artificial sequence
  Synthetic
ctctttccctacacgacgctcttccgatcttcctacgcaataaagatctcagcta

SEQ ID NO: 237 - DNA, 56 bp, artificial sequence
  Synthetic
ctctttccctacacgacgctcttccgatctggagaaacaggacgacattaatttgc

SEQ ID NO: 238 - DNA, 52 bp, artificial sequence
  Synthetic
ctctttccctacacgacgctcttccgatctgctaaaactgccaaagcgctat

SEQ ID NO: 239 - DNA, 50 bp, artificial sequence
  Synthetic
ctctttccctacacgacgctcttccgatcttgatgggtcacgacgacaat

SEQ ID NO: 240 - DNA, 19 bp, artificial sequence
  Synthetic
ctggagttcagacgtgtgc

SEQ ID NO: 241 - DNA, 59 bp, artificial sequence
  Synthetic
  misc_feature (30)..(37): n is a, c, g, or t
aatgatacggcgaccaccgagatctacacnnnnnnnnacactctttccctacacgacgc

SEQ ID NO: 242 - DNA, 55 bp, artificial sequence
  Synthetic
  misc_feature (25)..(32): n is a, c, g, or t
caagcagaagacggcatacgagatnnnnnnnngtgactggagttcagacgtgtgc

SEQ ID NO: 243 - protein, 349 aa, artificial sequence
  CRE recombinase
PKKKRKVSNLLTVHQNLPALPVDATSDEVRKNLMDMFRDRQAFSEHTWKMLLSVCRSWAAWCKLNNRKWFPAEPEDVRDYLLYLQARGLAVKTIQQHLGQLNMLHRRSGLPRPSDSNAVSLVMRRIRKENVDAGERAKQALAFERTDFDQVRSLMENSDRCQDIRNLAFLGIAYNTLLRIAEIARIRVKDISRTDGGRMLIHIGRTKTLVSTAGVEKALSLGVTKLVERWISVSGVADDPNNYLFCRVRKNGVAAPSATSQLSTRALEGIFEATHRLIYGAKDDSGQRYLAWSGHSARVGAARDMARAGVSIPEIMQAGGWTNVNIVMNYIRNLDSETGAMVRLLEDGD

SEQ ID NO: 244 - DNA, 34 bp, Artificial sequence
  Synthetic
ataacttcgtatagcatacattatacgaagttat

SEQ ID NO: 245 - protein, 423 aa, Artificial sequence
  FLP recombinase
MPQFDILCKTPPKVLVRQFVERFERPSGEKIALCAAELTYLCWMITHNGTAIKRATFMSYNTIISNSLSFDIVNKSLQFKYKTQKATILEASLKKLIPAWEFTIIPYYGQKHQSDITDIVSSLQLQFESSEEADKGNSHSKKMLKALLSEGESIWEITEKILNSFEYTSRFTKTKTLYQFLFLATFINCGRFSDIKNVDPKSFKLVQNKYLGVIIQCLVTETKTSVSRHIYFFSARGRIDPLVYLDEFLRNSEPVLKRVNRTGNSSSNKQEYQLLKDNLVRSYNKALKKNAPYSIFAIKNGPKSHIGRHLMTSFLSMKGLTELTNVVGNWSDKRASAVARTTYTHQITAIPDHYFALVSRYYAYDPISKEMIALKDETNPIEEWQHIEQLKGSAEGSIRYPAWNGIISQEVLDYLSSYINRRI

SEQ ID NO: 246 - DNA, 34 bp, Artificial sequence
  Synthetic
gaagttcctattctctagaaagtataggaacttc

SEQ ID NO: 247 - protein, 204 aa, Artificial sequence
  TniR resolvase
MLIGYMRVSKADGSQATDLQRDALIAAGVDPVHLYEDQASGMREDRPGLTSCLKALRTGDTLVVWKLDRLGRDLRHLINTVHDLTGRGIGLKVLTGHGAAIDTTTAAGKLVFGIFAALAEFERELIAERTIAGLASARARGRKGGRPFKMTAAKLRLAMAAMGQPETKVGDLCQELGVTRQTLYRHVSPKGELRPDGEKLLSRI

SEQ ID NO: 248 - DNA, 60 bp, Artificial sequence
  Synthetic
cggcgagaactttctggctcacactgtcacataatcgaacgtatatgtgacaggtacgac

SEQ ID NO: 249 - protein, 185 aa, Artificial sequence
  Tn3 resolvase
MRLFGYARVSTSQQSLDLQVRALKDAGVKANRIFTDKASGSSTDREGLDLLRMKVEEGDVILVKKLDRLGRDTADMIQLIKEFDAQGVAVRFIDDGISTDGDMGQMVVTILSAVAQAERRRILERTNEGRQEAKLKGIKFGRRRTVDRNVVLTLHQKGTGATEIAHQLSIARSTVYKILEDERAS

SEQ ID NO: 250 - DNA, 120 bp, Artificial sequence
  Synthetic
ccgtacgaaatgttataaattatcggacatcgtaaaactgttacattaatatgtctattaaatcgtaaatttgtaataatagacatgagttgtccgatattcgatttaaggtacattttt

SEQ ID NO: 251 - protein, 381 aa, Artificial sequence
  CRE recombinase
MGSSHHHHHHSSGLVPRGSHGGGSAAAMGTRLPKKKRKVSNLLTVHQNLPALPVDATSDEVRKNLMDMFRDRQAFSEHTWKMLLSVCRSWAAWCKLNNRKWFPAEPEDVRDYLLYLQARGLAVKTIQQHLGQLNMLHRRSGLPRPSDSNAVSLVMRRIRKENVDAGERAKQALAFERTDFDQVRSLMENSDRCQDIRNLAFLGIAYNTLLRIAEIARIRVKDISRTDGGRMLIHIGRTKTLVSTAGVEKALSLGVTKLVERWISVSGVADDPNNYLFCRVRKNGVAAPSATSQLSTRALEGIFEATHRLIYGAKDDSGQRYLAWSGHSARVGAARDMARAGVSIPEIMQAGGWTNVNIVMNYIRNLDSETGAMVRLLEDGD

SEQ ID NO: 252 - DNA, 1050 bp, Artificial sequence
  Synthetic
ccgaaaaaaaaacgcaaagtgtccaacctgctgacggtgcaccagaatctgccggcactgccggtcgatgcaaccagtgacgaagtgcgcaaaaatctgatggatatgtttcgtgaccgccaagccttcagcgaacatacgtggaaaatgctgctgtcggtttgccgtagctgggcggcctggtgtaaactgaacaatcgcaaatggtttccggcagaaccggaagatgtgcgtgactatctgctgtacctgcaggcacgtggtctggcagttaaaaccatccagcaacatctgggccaactgaacatgctgcaccgtcgctctggtctgccgcgtccgagtgattccaatgccgtcagtctggtgatgcgtcgcattcgtaaagaaaacgtggatgcaggcgaacgcgctaaacaggcactggcttttgaacgtaccgatttcgaccaagttcgctctctgatggaaaacagtgatcgttgccaggacatccgcaatctggcattcctgggtattgcttataacaccctgctgcgcattgcagaaatcgctcgtattcgcgtgaaagatatcagccgtacggacggcggtcgcatgctgattcacatcggccgtaccaaaacgctggtttccaccgcgggcgtcgaaaaagccctgtcactgggtgtcacgaaactggtggaacgctggatttcagtttcgggcgtcgcagatgacccgaacaattacctgttttgtcgtgtgcgcaaaaatggtgttgcagctccgagcgctacctctcagctgagtacgcgtgcgctggaaggcatcttcgaagccacccatcgcctgatttatggcgcgaaagatgacagcggtcagcgttacctggcatggtccggtcactcagctcgtgttggtgcagcacgtgatatggcacgtgcaggtgtctctatcccggaaattatgcaggccggcggttggacgaacgtgaatattgttatgaactatattcgtaacctggactctgaaacgggtgcgatggtgcgtctgctggaagatggcgactga

SEQ ID NO: 253 - DNA, 1146 bp, Artificial sequence
  Synthetic
atgggctcatcgcatcatcatcatcatcattcatcgggtctggttccgcgcggttcacacggtggtggttcggcggccgctatgggcacccgcctgccgaaaaaaaaacgcaaagtgtccaacctgctgacggtgcaccagaatctgccggcactgccggtcgatgcaaccagtgacgaagtgcgcaaaaatctgatggatatgtttcgtgaccgccaagccttcagcgaacatacgtggaaaatgctgctgtcggtttgccgtagctgggcggcctggtgtaaactgaacaatcgcaaatggtttccggcagaaccggaagatgtgcgtgactatctgctgtacctgcaggcacgtggtctggcagttaaaaccatccagcaacatctgggccaactgaacatgctgcaccgtcgctctggtctgccgcgtccgagtgattccaatgccgtcagtctggtgatgcgtcgcattcgtaaagaaaacgtggatgcaggcgaacgcgctaaacaggcactggcttttgaacgtaccgatttcgaccaagttcgctctctgatggaaaacagtgatcgttgccaggacatccgcaatctggcattcctgggtattgcttataacaccctgctgcgcattgcagaaatcgctcgtattcgcgtgaaagatatcagccgtacggacggcggtcgcatgctgattcacatcggccgtaccaaaacgctggtttccaccgcgggcgtcgaaaaagccctgtcactgggtgtcacgaaactggtggaacgctggatttcagtttcgggcgtcgcagatgacccgaacaattacctgttttgtcgtgtgcgcaaaaatggtgttgcagctccgagcgctacctctcagctgagtacgcgtgcgctggaaggcatcttcgaagccacccatcgcctgatttatggcgcgaaagatgacagcggtcagcgttacctggcatggtccggtcactcagctcgtgttggtgcagcacgtgatatggcacgtgcaggtgtctctatcccggaaattatgcaggccggcggttggacgaacgtgaatattgttatgaactatattcgtaacctggactctgaaacgggtgcgatggtgcgtctgctggaagatggcgactga

SEQ ID NO: 254 - DNA, 1272 bp, Artificial sequence
  Synthetic
atgccacaatttgatatattatgtaaaacaccacctaaggtgcttgttcgtcagtttgtggaaaggtttgaaagaccttcaggtgagaaaatagcattatgtgctgctgaactaacctatttatgttggatgattacacataacggaacagcaatcaagagagccacattcatgagctataatactatcataagcaattcgctgagtttcgatattgtcaataaatcactccagtttaaatacaagacgcaaaaagcaacaattctggaagcctcattaaagaaattgattcctgcttgggaatttacaattattccttactatggacaaaaacatcaatctgatatcactgatattgtaagtagtttgcaattacagttcgaatcatcggaagaagcagataagggaaatagccacagtaaaaaaatgcttaaagcacttctaagtgagggtgaaagcatctgggagatcactgagaaaatactaaattcgtttgagtatacttcgagatttacaaaaacaaaaactttataccaattcctcttcctagctactttcatcaattgtggaagattcagcgatattaagaacgttgatccgaaatcatttaaattagtccaaaataagtatctgggagtaataatccagtgtttagtgacagagacaaagacaagcgttagtaggcacatatacttctttagcgcaaggggtaggatcgatccacttgtatatttggatgaatttttgaggaattctgaaccagtcctaaaacgagtaaataggaccggcaattcttcaagcaataaacaggaataccaattattaaaagataacttagtcagatcgtacaataaagctttgaagaaaaatgcgccttattcaatctttgctataaaaaatggcccaaaatctcacattggaagacatttgatgacctcatttctttcaatgaagggcctaacggagttgactaatgttgtgggaaattggagcgataagcgtgcttctgccgtggccaggacaacgtatactcatcagataacagcaatacctgatcactacttcgcactagtttctcggtactatgcatatgatccaatatcaaaggaaatgatagcattgaaggatgagactaatccaattgaggagtggcagcatatagaacagctaaagggtagtgctgaaggaagcatacgataccccgcatggaatgggataatatcacaggaggtactagactacctttcatcctacataaatagacgcatataa

SEQ ID NO: 255 - DNA, 615 bp, Artificial sequence
  Synthetic
atgctgatcggctacatgcgcgttagcaaagccgatggtagccaagccaccgatctgcagcgtgatgcgctgattgcggcgggcgttgatccggttcatctgtacgaagatcaagccagcggcatgcgcgaagatcgtccgggtctgaccagctgtctgaaagcgctgcgcacgggcgatacgctggtggtttggaaactggatcgtctgggtcgcgatctgcgccatctgatcaataccgtgcatgatctgacgggccgcggcatcggtctgaaagttctgacgggtcatggcgcggccattgataccaccacggccgcgggtaaactggtgttcggcatctttgccgcgctggccgagttcgaacgcgaactgatcgccgaacgcaccattgcgggtctggccagtgcccgtgcccgtggtcgcaaaggtggtcgtccgttcaaaatgacggcggcgaaactgcgtctggcgatggcggcgatgggccaaccggaaaccaaagttggcgatctgtgccaagaactgggcgttacccgtcagacgctgtaccgccacgttagcccaaaaggcgaactgcgcccagatggcgaaaaactgctgagccgcatctag

SEQ ID NO: 256 - DNA, 558 bp, Artificial sequence
  Synthetic
atgcgactttttggttacgctcgggtctcaaccagtcagcagtctcttgatcttcaggtcagagcactcaaagacgcaggtgtgaaagcaaaccgtatatttaccgataaggcatccggcagttcaacagaccgggaagggctggatttgctgaggatgaaggtggaggaaggtgatgtcattctggttaagaagctcgaccgtcttggccgcgacactgccgatatgatccaactgataaaggaatttgacgctcagggcgtggcagtccggttcattgatgacgggatcagtaccgacggtgatatggggcaaatggtggtcaccatcctgtcggctgtggcacaggctgaacgccggaggatcctagaacgcacgaatgagggccgacaggaagcaaagctgaaaggaatcaaatttggccgcaggcgtaccgtggacaggaacgtcgtgctgacgcttcatcagaagggcactggtgcaacggaaattgctcatcagctcagtattgcccgctccacggtttataaaattcttgaagacgaaagggcctcgtga

SEQ ID NO: 257 - DNA, 15878 bp, Artificial sequence
  Synthetic
acacatgttctaatccctttatttatgggcgtttgcgaagaagtgatagagcatattacagacgatgcttataacagacaaggggaatttatagagctaagtggttgatttactgtcggaaaaagaaaaacgatagggaaaaagagcaaagcaaaaccaaccaacgggcggtaggattggaaacgggtttttatggcgtgtacacgtttgtgtacaaaatgtttgtattttattgaaatatagctatctttgtgctgaatttaaaagcaaacagatatggaagcattatcagtaagagaataccgtaacaacctcgcagcgtctttcaccaaagctgacaatggcgagcaggtactaattcgcaggaaaaacgagatttacgctttggtaaaagttggtcgtgaagatttgatgataaccccggagctgcaagcaaggattgacaaggcaagggaagaactcgagtgatctggaagaagcaatgaaagctgctgttaagtctccgaatcaggtattgttcctgacaggtgtattcccatccggtaaacgcggatactttgcagttgatctgactcaggaataaattataaattaaggtaagaagattgtaggataagctaatgaaatagaaaaaggatgccgtcacacaacttgtcggcattcttttttgttttattagttgaaaatatagtgaaaaagttgcctaaatatgtatgttaacaaattatttgtcgtaactttgcactccgcggccgcattttaaaataaaataaataatttacttaattaaacgaatatggcgacaagtttacctacgccctcagcaattacgacttcggcgttagagtatgcattccatactcccgctcgcaatctaacgaaatctcgcggaaaaaacattcatcgttatgtcagtgtaaagatgagtaagaggattacggtagaatctactctagagtgtgatgcctgctatcactttgattttgagccaagtattgttcgcttttgcgctcaaccgattcgatttttatattatctcaatggtcagtctcactcctatgttcctgactttctagttcaatttgataccaacgagtttgttctatatgaagtaaagtcagcttatgctaagaacaaacctgattttgatgttgaatgggaggcgaaagtaaaagcagcaactgaactagggctagaattggagcttgttgaagagagtgatattagggatacggttgtattaaataatcttaagcgcatgcatcgttatgcttcgaaagatgagctgaataacgtacataactctctcttaaaaataataaagtacaatggcgcccaatctgcaagatgcttgggagaacagttgggtttaaaaggccgaactgttttaccaattttgtgcgatttgctgtcaaggtgtttactcgatacacgtttggataagcctctatctcttgaatctcgatttgagttggccagttacggataggcgcgccgcattttaaaataaaataaatgatataattaattaaacgaatatggctaagaaagggttctcaagtttccatagaaaagcagtctcttcccaagatacgcttgaatcgatagagcttgtctctagcgctaattgtctagaaagtgttacgtatcaagatatatcagcatttcccgaaacaattgcggtagagattaatttccgattaagcattcttcgctttttagcgcgaaagtgcgaaaccattgtggccaaatcaattgaaccacatcgtgtagagctacagcaaaactatagtagaaaaatacccagtgcaataacgatatatcgatggtggcttgcttttcgaaaatcagactacaaccccattagcttagcacctaatatcaaggatagaggtaatagagagacaaaagtgtcaacagttgttgattctattatggaacaggcagttgaaagagttatatctggacgaaaagtcaatgttagctctgcatataaacgtgttcgacgaaaagttcgtcaatacaatctaactcatggaacgaaatacacgtatcctaagtacgaatctgtaagaaagcgagtaaaaaagaaaaccccatttgagttattagccgcagggaaaggggagagagtagctaagagagagtttcgccgaatgggaaaaaagatcctcacgtctagcgtgctagagagggttgaaatagatcacactgtcgttgacctttttgcagtacacgaagagtatcgaatcccattgggccgaccttggcttactcaattggttgattgttacagtaaagctgtaatcggtttttatttaggtttcgagcctcctagctatgtgtcggtttcccttgcacttaagaatgcaatacaacgcaaagatgacttaatctcctcgtatgaatcgatcgagaatgaatggctatgttatggcatcccagacctactcgtaactgataatggtaaagagtttttgtcgaaagcatttgatcaagcatgtgaatcactattgatcaatgtgcatcaaaataaagttgagacgcccgacaacaaacctcatgttgaacgtaactacgggactattaatacttctctgttagacgatttacctgggaaatccttcagccagtaccttcaaagagaagggtacgactctgtgggagaagctacccttacactcaatgagattagagaaatttacttaatttggttggtggatatttatcataaaaaacccaatcagagaggcactaattgtcctaatgttgcgtggaaaaagggttgtcaagaatgggaaccagaggagttctctggttctaaagacgaattagactttaaatttgctattgttgattacaaacaacttactaaagtagggataactgtctacaaagaactgagttatagcaatgaccgtttagctgaatatagagggaagaaaggaaaccataaagttcagttcaagtataaccctgagtgtatggcagttatttgggtgttggatgaggatatgaatgagtactttacagttaatgcgattgactacgaatatgcaagtagagtatcactttggcaacataaatataacatgaaatatcaagcagaactaaattcagcagaatatgatgaggacaaggaaattgatgcagaaataaaaattgaagaaatcgcagatcgttcaattgttaagactaacaaaatcagagctcggaggcgtggcgctaggcatcaagagaatagcgcaagggctaagtcaatcagtaatgcgaacccggcctcgatacaaaaacatgaagatgaaatcgttagtgcagataatgacgattgggatattgattatgtctgaccggtcgcattttaaaataaaataaataatataattaattaaacgaatatgagtgaaacgcgtgaggctcgtatatcaagagctaaaagggcatttgtatccacaccgagcgttaggaaaatcttgagttacatggatagatgtagagatctatcagacctagagtctgagcctacatgcatgatggtctatggtgcttcgggtgtaggtaaaacgaccgtcatcaagaaatacttaaatcaaaacagaagagagtccgaagccgggggcgatataatacctgttttgcatattgagttgccagacaatgcgaagccagtagatgcagcaagggaattgctggttgaaatgggtgacccgctagcactttatgaaactgacttagctagattgacgaaaagactgactgaattaatccctgcggtcggcgtgaagctgattattatcgatgagttccaacatttggtggaagaaaggtcaaatcgggttcttacccaagtaggtaattggctaaaaatgatacttaacaaaacgaaatgtccaattgttatatttggtatgccatactcaaaagttgtactgcaagcaaactcgcaacttcacgggcgattttccattcaggttgaactgcgcccctttagctaccagggaggtagaggtgtatttaaaacttttttggaataccttgataaagccctaccttttgaaaaacaggctggcttagccaacgaaagtttgcagaaaaaattgtatgcattctctcagggaaacatgcgttcgttgagaaaccttatttatcaagcatctatcgaagcaattgataatcagcatgagacgataaccgaagaagatttcgtttttgcatcgaagttgacatcgggcgataaacccaactcatggaaaaatccttttgaggagggtgttgaggtaacagaagatatgttacgaccgccaccaaaagatattggttgggaggactatttgagacattcaaccccgagagtgagtaaaccaggtagaaataaaaactttttcgaataacgtacgcattttaaaataaaataaataatttacttaattaaacgaatatgtttttgcaaagacctaaaccttacagcgatgaaagtttagaaagtttctttatccgagtggctaacaaaaatggctacggtgatgtccatcgcttcctagaagccactaaacgattccttcaagacattgaccataatggctatcaaacctttccgactgatataactcggataaacccatactcagctaaaaacagttccagcgcacgaactgcgtcattcctgaaacttgcacaattgacatttaatgaaccgccagagctacttgggttggcaattaacagaacaaacatgaaatactcgccgtcaactagcgcggttgttagaggtgcagaagtctttcctcgcagtttactacggacgcactccatcccctgctgtcctttgtgtctgcgagaaaatggctacgcctcctacctttggcactttcaggggtacgaatactgccacagccataacgtacctttaattaccacttgtagctgtggtaaggagtttgactaccgagtatctgggttaaagggcatttgctgcaaatgcaaggagcctatcaccttaaccagcagggagaacggtcatgaggcagcgtgtactgtttcaaactggcttgctggccatgaatctaaacctctgccaaatcttcctaaaagctaccgatggggtttagttcattggtggatgggtattaaagatagcgagttcgatcacttttcgttcgttcaatttttctcaaactggccaaggtcattccactcgataatcgaagatgaagtagagttcaaccttgagcatgctgttgtcagcacgtctgaattacgactaaaagatcttcttggtcgattgtttttcggttcaattcggttacctgagcggaatcttcaacacaatatcatccttggtgagcttctctgctatttagaaaatcgtttatggcaagacaagggattaatcgccaacctcaaaatgaacgcgttagaggcgactgtaatgttaaattgtagcctcgatcagattgcatcaatggttgaacaacgcatcttgaagccaaatcgaaaaagcaagcccaacagccctcttgatgttaccgattatctatttcatttcggcgatattttctgtctttggttagctgagttccaaagcgatgagtttaaccgttcgttttatgtgtcgaggtggtaacccgggcgcattttaaaataaaataaatgatataattaattaaacgaatatgcaaactctgaaagaactaatcgcatccaatcctgacgacttaacaactgaacttaagagagcatttcgtccactcacaccgcatattgcaattgatggtaatgaacttgacgcactgacgatattagtcaatttaaccgataagactgatgatcagaaagacctgctcgatcgagccaaatgcaagcaaaaacttcgagatgaaaaatggtgggctagctgcataaattgcgttaattacagacaaagccataacccaaaattcccggatatacgttctgaaggcgtgattcgaacccaagccctgggtgaattaccgagtttcctactctcgtcctcaaaaatcccaccataccattggtcatatagccatgattcaaaatacgtcaacaaaagcgcattcctcaccaatgagttttgttgggatggtgagatctcatgtttgggtgagcttcttaaagatgcagatcacccactttggaatactttgaaaaagttaggttgttctcaaaaaacttgcaaagcaatggcaaaacaactagctgatattactctcacgactatcaatgtcacactcgcaccaaattacctgactcaaatatctctccccgatagtgatacatcctacatttcactctctcctgttgcatcgctatcgatgcaaagccactttcatcagaggctccaagatgaaaatcggcatagcgcgataacgcggtttagccgaactaccaacatgggggtcactgcgatgacatgtggcggcgcatttagaatgttaaagtctggcgctaagttttccagcccccctcatcaccgattaaacagtaaacgaagttggttgacgtcagagcatgttcagtcattaaaacagtaccagcgcctcaacaaaagcctcatacctgaaaactctcggattgcactccgtagaaaatacaaaatcgagcttcaaaatatggtcagatcttggtttgcaatgcaagaccatacccttgattcgaacatacttatccaacatttgaatcatgacctatcttacttaggagccacaaaacgttttgcatacgatccagcgatgaccaagctctttactgagcttttgaaacgagagttatcaaattcaatcaataatggtgagcaacacactaatggatcgtttttagtcctaccgaatatcagggtttgtggcgcaacagctttaagctccccggtaacggtggggattccatcacttacagctttctttggcttcgttcacgcatttgaacggaatataaatcgcaccacctcatcgtttcgtgttgaatcctttgcgatatgcgtccatcaactacatgtcgagaagcgaggtttgacagcagagtttgtggaaaaaggcgacgggactatatccgctcccgcgaccagggatgactggcagtgtgatgtcgtatttagccttattttgaacaccaactttgctcaacatattgaccaagatacgttagttacatcactaccaaagcgattggctcggggttcagcaaaaattgcgattgatgactttaaacatatcaactcattctcgacattagaaacagcgatcgaatctctgccaatagaagctggtaggtggttatcactttacgcacagtcaaacaataatctaagtgatctattagcagccatgacagaggaccatcagctcatggcaagctgcgtcggttaccacttgttagaagagcccaaagataaaccaaactccctcagaggttacaaacacgctatcgccgagtgcatcattggactcattaactcaatcacctttagctcagagactgatcccaacacaatcttttggtcgctaaagaactatcaaaactacctagtggtacagccaaggagtatcaacgatgaaactaccgacaaatctagcctatgacacgtgcgcattttaaaataaaataaataatataattaattaaacgaatatgaaactaccgacaaatctagcctatgagcgctctatcgacccatcagatgtctgtttttttgtcgtctggcccgatgatagaaaaacacctttaacctacaattctcgtactctgctcgggcaaatggaagcggcatcattagcctatgatgtctcaggtcaaccaataaaaagtgccaccgctgaggcgttagctcaagggaaccctcatcaagttgatttctgccacgttccatacggtgcgagtcatattgaatgcagtttctccgtctcgttttcttctgaactacgtcaaccatataagtgtaactcaagcaaagttaaacaaacgctagtgcaattagtcgagctctacgaaacgaaaatcggctggactgagctagcaacccgatatttgatgaacatttgcaacggtaaatggctgtggaaaaatacccgtaaagcctattgctggaacattgtacttacaccttggccttggaacggggaaaaggttggatttgaagatattcgtactaactacacctcacggcaagactttaaaaataataaaaattggtctgctatagttgaaatgatcaaaaccgcattttctagtactgatgggctggcgatatttgaagtcagggccaccttgcacttgccaacgaatgctatggtgcggccaagccaagttttcacagaaaaagaaagtggcagtaaaagtaaatctaaaactcaaaacagtcgagtttttcagagtacaactattgatggtgaacgatcgccaatactaggggcctttaaaacgggagcagctattgcaaccattgacgactggtatcctgaagccactgagccactaagggtcggacggtttggggttcatcgcgaagatgtcacttgctaccgtcatccgtctaccggaaaagattttttctcgatattacaacaagcagagcactatattgaagtgttgagcgccaacaaaactcccgctcaagaaactatcaacgacatgcactttttaatggctaacctgattaagggtgggatgttccagcataaaggagactgaaaatctgtttttaacatatggcactaatgaaatggtattataagacaatcacctttctgccagagttgtgcaacaacgagtcactggctgcaaagtgtctccgcgttctgcatggatttaactatcagtatgagacacgaaatatcggcgtttcatttccgctttggtgtgatgcaacggttggaaaaaagatttcatttgtcagcaagaacaagatagaactcgacttactacttaaacaacactatttcgtccaaatggaacaacttcaatactttcatatatccaacactgttctcgtcccagaagattgtacatacgtttcctttagacgctgtcaatctatagataagctcacagcagcagggctggcaaggaaaatcagacgcctggagaaacgtgctctatctagaggcgagcaatttgacccatcatcttttgctcaaaaagagcatactgcaatagcgcactaccactcacttggggagtccagcaaacagacgaaccgcaactttcgactcaatatcaggatgctctcggagcaaccccgtgaggggaactcgatttttagtagctatggcttatcaaattcagaaaactcgtttcagcctgtacccttaatctgacgatataccatgggataaagtttggaagataaagctaaaagttcttatctttgcagtggatccgtgaactgccgagtaggtagctgataacagtcttcctgtcttgtcagctaggtgaagactgtgaactgccgagtaggtagctgataacgctgctgccaccgctgagcaataatgaactgcacttgctttgataattaatgataaacaatctaaaagcactctaatcgttatcggagtgcttttagattactaatcaaattgcttctactaattgcctatcttggtcgacggtatcgataagcttgatatcgaattctgttggaacaaccataaaatgataattacacccataaattgataattatcacacccataaattgatattgcctcttcatggtctaaacttcagtaagtttacgacattttcatgaagaggtcatttcctaggttacaaagaaaattcgacaaactgttatttttctatctatttatttgggtgggaaactttagttatgtacctttgtcggcaaataaagatattctcgtcaaacaaatataaataatataaacatggcaaacttgttacaacaaaacggtattgacattaccgtttacgaaagagatgaaaacccaaaagcacgagtttggggcggaacgcttgaccttcacaaaaattcaggacaagaagcaatgaaaaaagtaggattgttgcaaacctactatgatttggcgctacctatgggcgtaaactttgctgatgagaagggtaacattatagcaacaagaaacccgacactcgaaaataagtttgacaaccccgaaataaatagaaacgcgttgcgaaaaatgttgcttggcagcttgaaaaatgacacagttgtttgggatagaaaatctattgggcttgaacaagaaaacggaaaatggctgctacattttgaaaataagccaactgcattggccgactttattattgtttccaatggtggaatgtctaaaataagaaattttgtttcagataatgaagtcgaagaaacaggtacttttattattcagggcgacattcctgaaccagaaacgaactgccctgaattttataagttgtgcaacaacaatagactaatgaccgcacatcaagggaatttattagttgcgaatccatttaacaacggaatgttaacttacggtgtcattttcaaaaagcctgaagaatggaataatggaaaaggattagattttaagcccacaaaaagcgtttccgagttcttgacaaacaggttttcaaattggagcaatgaatacaaggagttaattcgttcaacaacttttttcgttggtttaacaataaaaatatttccgctagacaaaaagccttggaagagtaatcgtccgttacccataactttaattggcgacacagctcacctaatgccaccttttgcagggcagggcgtaaacattggactaatggacgctttgattttgtcagaaaatcttacaaacgggaaatttggaacgatacaaagtgctattgatgactatgaacaacgaatgtttgtttacgcaacagaagcacaagcggactcgacaaagaatgaaatagaaatgcgaaatccgagctttacttttcaacagctaatgaatgtataatttttttaaggcagttattggtgcccttctagagtccttactgcagtagttttgctgaaatactcgattcacaaaaatatcaacttatggttgttttgtgagatatcaatatatggttgttttgtggttaagttgctgattataaataattattaaatatcactttatggttgcatcaacatgcttcggggtcattatagcgattttttcggtatatccatcctttttcgcacgatatacaggattttgccaaagggttcgtgtagactttccttggtgtatccaacggcgtcagccgggcaggataggtgaagtaggcccacccgcgagcgggtgttccttcttcactgtcccttattcgcacctggcggtgctcaacgggaatcctgctctgcgaggctggccggctaccgccggcgtaacagatgagggcaagcggatggctgatgaaaccaagccaaccaggaagggcagcccacctatcaaggtgtactgccttccagacgaacgaagagcgattgaggaaaaggcggcggcggccggcatgagcctgtcggcctacctgctggccgtcggccagggctacaaaatcacgggcgtcgtggactatgagcacgtccgcgagctggcccgcatcaatggcgacctgggccgcctgggcggcctgctgaaactctggctcaccgacgacccgcgcacggcgcggttcggtgatgccacgatcctcgccctgctggcgaagatcgaagagaagcaggacgagcttggcaaggtcatgatgggcgtggtccgcccgagggcagagccatgacttttttagccgctaaaacggccggggggtgcgcgtgattgccaagcacgtccccatgcgctccatcaagaagagcgacttcgcggagctggtgaagtacatcaccgacgagcaaggcaagaccgatccggtgtgaaagccaccgcggttgtctctctttcctctctgaaaaataaatgtttttattgcttattatccgcacccaaaaagttgcatttataagttgaactcaagaagtattcacctgtaagaagttactaatgacaaaaaagaaattgcccgttcgttttacgggtcagcactttactattgataaagtgctaataaaagatgcaataagacaagcaaatataagtaatcaggatacggttttagatattggggcaggcaaggggtttcttactgttcatttattaaaaatcgccaacaatgttgttgctattgaaaacgacacagctttggttgaacatttacgaaaattattttctgatgcccgaaatgttcaagttgtcggttgtgattttaggaattttgcagttccgaaatttcctttcaaagtggtgtcaaatattccttatggcattacttccgatattttcaaaatcctgatgtttgagagtcttggaaattttctgggaggttccattgtccttcaattagaacctacacaaaagttattttcgaggaagctttacaatccatataccgttttctatcatactttttttgatttgaaacttgtctatgaggtaggtcctgaaagtttcttgccaccgccaactgtcaaatcagccctgttaaacattaaaagaaaacacttattttttgattttaagtttaaagccaaatacttagcatttatttcctgtctgttagagaaacctgatttatctgtaaaaacagctttaaagtcgattttcaggaaaagtcaggtcaggtcaatttcggaaaaattcggtttaaaccttaatgctcaaattgtttgtttgtctccaagtcaatggttaaactgttttttggaaatgctggaagttgtccctgaaaaatttcatccttcgtagttcaaagtcgggtggttgtcaagatgatttttttggtttggtgtcgtctttttttaagctgccgcataacggctggcgagctccagcttttgttccctttagtgagggttaattgcgcgcttggcgtaatcatggtcatagctgtttcctgtgtgaaattgttatccgctttttccataggctccgcccccctgacgagcatcacaaaaatcgacgctcaagtcagaggtggcgaaacccgacaggactataaagataccaggcgtttccccctggaagctccctcgtgcgctctcctgttccgaccctgccgcttaccggatacctgtccgcctttctcccttcgggaagcgtggcgctttctcatagctcacgctgtaggtatctcagttcggtgtaggtcgttcgctccaagctgggctgtgtgcacgaaccccccgttcagcccgaccgctgcgccttatccggtaactatcgtcttgagtccaacccggtaagacacgacttatcgccactggcagcagccactggtaacaggattagcagagcgaggtatgtaggcggtgctacagagttcttgaagtggtggcctaactacggctacactagaaggacagtatttggtatctgcgctctgctgaagccagttaccttcggaaaaagagttggtagctcttgatccggcaaacaaaccaccgctggtagcggtggtttttttgtttgcaagcagcagattacgcgcagaaaaaaaggatctcaagaagatcctttgatcttttctacggggtctgacgctcagtggaacgaaagagtaaacttggtctgacagttaccaatgcttaatcagtgaggcacctatctcagcgatctgtctatttcgttcatccatagttgcctgactccccgtcgtgtagataactacgatacgggagggcttaccatctggccccagtgctgcaatgataccgcgagacccacgctcaccggctccagatttatcagcaataaaccagccagccggaagggccgagcgcagaagtggtcctgcaactttatccgcctccatccagtctattaattgttgccgggaagctagagtaagtagttcgccagttaatagtttgcgcaacgttgttgccattgctacaggcatcgtggtgtcacgctcgtcgtttggtatggcttcattcagctccggttcccaacgatcaaggcgagttacatgatcccccatgttgtgcaaaaaagcggttagctccttcggtcctccgatcgttgtcagaagtaagttggccgcagtgttatcactcatggttatggcagcactgcataattctcttactgtcatgccatccgtaagatgcttttctgtgactggtgagtactcaaccaagtcattctgagaatagtgtatgcggcgaccgagttgctcttgcccggcgtcaatacgggataataccgcgccacatagcagaactttaaaagtgctcatcattggaaaacgttcttcggggcgaaaactctcaaggatcttaccgctgttgagatccagttcgatgtaacccactcgtgcacccaactgatcttcagcatcttttactttcaccagcgtttctgggtgagcaaaaacaggaaggcaaaatgccgcaaaaaagggaataagggcgacacggaaatgttgaatactcatactcttcctttttcaatattattgaagcatttatcagggttattgtctcatgagcgggccagggttttcccagtcacgacgttgtaaaacgacggccagtgagcgcgcgtaatacgactcactatagggcgaattgggtacctacccggagtgtttcagccgggtaatcttgttacttatccttgattttccctttaagggcgtttataatccaccctttcggattgttcttttctcgtgattttccgtttaggagagccagttctccgataaggtcggttatcttttcttgtgccgttatgaatgtctctttgttccggtttatctcttccgatgtgaagccgcaggaataacggaggtactcgtacacatggctgtctatctgatatcgtgctgtaacctttgcttgcaattctttcccttccagttcttcatctctgaactgtggttgatagaccgggtagaacctaaacccggtcaccttgctacgtttgttgtttgggttttcacgcactttcacgtagttgaaagtgtatgggcagctctcatcaagcgcagcctttgctggtttcaaaactctttcctcaaaatgatctattctgtcttttccgttcttgtccttgtatttgtccgcaggtatgccaagacggtctttcaagttttcaagggatatatccaaagggtacacctgcccactcattaacatgtaaaacctaagggaatacccagtaggtagcgcaagagccttgtttaactcaaattctctgtaccccttggcgaacttggtaaacacatcccaaaggtcgttagacacacgaaaggttataatgccagtgcgttttttatattttgggttagatataaatccgcacttccaccattcctcgtcatcttcgtaagtaaaaaaacgtcctgccaaagaatcgagtgcggctatgatttcattgtaatcacgtccggaaaaaataacgtcagatacatgcatttgtgcatcaacatcccaaagtccatgctcaaacttgcgtttcgtgcctgcataatctttcagttttactccctttagttcagcttggcacgcttccagtatgcgaagaactattctttgttcgtgtatggacatgtcttgctgttttgaccatgtatatacccatgaaacaacaacatctttattcttggtaataggtagtttctttttcataaacgattgatttgctgcaaatatacacaatccccacattaaaacaaaaaaagaggggtaaaactcccaaagtgtggggactaatttacttttaaactcccaaagtgtggggactaaactcccaaagtgtggggaa

SEQ ID NO: 258 - DNA, 32 bp, Artificial sequence
  Synthetic
gctgactttcagttcccaaagtccgctctcac

SEQ ID NO: 259 - DNA, 32 bp, Artificial sequence
  Synthetic
ggttgaaaaggacaatgaagaaacggaggaat

SEQ ID NO: 260 - DNA, 32 bp, Artificial sequence
  Synthetic
tgaaacggatcgtgtgatacggaaagacagcc

SEQ ID NO: 261 - DNA, 114 bp, Artificial sequence
  Synthetic
atatggttgttttgtggttaagttgctgattataaataattattaaatatcactttatggttgcatcaacacgtgtcacacgatccgtttcaggggtagacgcaaattgcggag

SEQ ID NO: 262 - DNA, 121 bp, Artificial sequence
  Synthetic
gagatatcaatatatggttgttttgtggttaagttgctgattataaataattattaaatatcactttatggttgcatcaacaaatactttttcctgaaaataaagtaagtcggaagtcagt

SEQ ID NO: 263 - DNA, 119 bp, Artificial sequence
  Synthetic
tgattataaataattattaaatatcactttatggttgcatcaacaccaaagtccgctctcactgtgccgcaggtagtttccgccatactgccggaggctgtctttccgtatcacacgat
